United States Patent Application Publication US 2025/0084491 A1 - sequence listing, part 46

SEQ ID NO: 883303 - DNA, 75 bp, synthetic construct
  source 1..75: mol_type = other DNA
gctgcatccctaaacagcaagaaaaagaaacgttactatcactttgctgtaagaaaggctgttgaaggttttcca

SEQ ID NO: 883304 - DNA, 75 bp, synthetic construct
  source 1..75: mol_type = other DNA
cagcgcggtgtaccccgacgggaaattgccgaaaagttcggaatgaagttgcgtgcagtgaataactacgtttat

SEQ ID NO: 883305 - DNA, 75 bp, synthetic construct
  source 1..75: mol_type = other DNA
ttacgaccaatataccgcgaacacacgttttcgttatagttttattactaaccagcgtcgatacgatcgtttatc

SEQ ID NO: 883306 - DNA, 75 bp, synthetic construct
  source 1..75: mol_type = other DNA
cgtttatcggctatcagcaggtctttcttctggccgcggcctgcgcgctgctgggcgcggcggttgtccatctcc

SEQ ID NO: 883307 - DNA, 75 bp, synthetic construct
  source 1..75: mol_type = other DNA
catcgatcacgctgtttcgcatcagcgccgcgatgtttctcaactatctgactattggcatcccgttagtcatgc

SEQ ID NO: 883308 - DNA, 75 bp, synthetic construct
  source 1..75: mol_type = other DNA
cttaaagagattttaggccattcagatataaaaatgactatgatctatgctcactttgcgccaacgcatcttgaa

SEQ ID NO: 883309 - DNA, 75 bp, synthetic construct
  source 1..75: mol_type = other DNA
aacgccgggaagtgccggatgtattcaatattgcggcttcactttcactgcaagcctccatttcgctcgacagac

SEQ ID NO: 883310 - DNA, 75 bp, synthetic construct
  source 1..75: mol_type = other DNA
gctatacagcgggcagcagtttctcatgctgtacgcaccaacacgaagtggtaaaggtgtcgcgatcgttatacc

SEQ ID NO: 883311 - DNA, 75 bp, synthetic construct
  source 1..75: mol_type = other DNA
cagaaatatgggtggacaagataatggttaatttgaaagcagtcattctcgtagtaggattggatatgaacatgc

SEQ ID NO: 883312 - DNA, 75 bp, synthetic construct
  source 1..75: mol_type = other DNA
tttacaccgagcatttttatccggacggtagccgtggacgccgggcgaaatccatcgcttttgcgaatatggacg

SEQ ID NO: 883313 - DNA, 75 bp, synthetic construct
  source 1..75: mol_type = other DNA
ccaaaacctaaaatgtgaaattgtaattgaaaaagatttacttagaaattttatctcacacactaaaaaacaaat

SEQ ID NO: 883314 - DNA, 75 bp, synthetic construct
  source 1..75: mol_type = other DNA
caaccgaaagatgccaccctgacggcgctggccgggcttgctactgcagcagacaggtttccgtattttacgggg

SEQ ID NO: 883315 - DNA, 75 bp, synthetic construct
  source 1..75: mol_type = other DNA
gtaatacgactaaatagacggttcactgaagaacacatcgaaaggctgattttcccggtactcatcaagaacatc

SEQ ID NO: 883316 - DNA, 75 bp, synthetic construct
  source 1..75: mol_type = other DNA
ttagttcgactaaatagacggttcactgaagaacacatagagcggctgatcttcccggtactcatcaataacatc

SEQ ID NO: 883317 - DNA, 75 bp, synthetic construct
  source 1..75: mol_type = other DNA
atcatgagcaacgctatctatctgccgtatttggtacactaaaaaaactaggccattggtcgcttccaaatccat

SEQ ID NO: 883318 - DNA, 75 bp, synthetic construct
  source 1..75: mol_type = other DNA
tttgccagaacgccggtgatgcttgatggaagtgatgtcactaaaatcagcaggcaatatccggttatttttctc

SEQ ID NO: 883319 - DNA, 75 bp, synthetic construct
  source 1..75: mol_type = other DNA
catggacacactggtgctacataggaaaaataatcatctgattctcaacgggaatttaaaatcagataatcttct

SEQ ID NO: 883320 - DNA, 75 bp, synthetic construct
  source 1..75: mol_type = other DNA
caaccttttttcagctaccctcgcgtattaggacatgaaatttgcgggacgatcgtcgcgctcggcagccagact

SEQ ID NO: 883321 - DNA, 75 bp, synthetic construct
  source 1..75: mol_type = other DNA
cagcaggccattcgccagcgggcgattgtctacgtcggactggatgcgttgtccgatgcagagattgccgccgcc

SEQ ID NO: 883322 - DNA, 75 bp, synthetic construct
  source 1..75: mol_type = other DNA
tttcttgacggatacagtgcggagactctcgacgacctgatcggcttccccggattcgcgcgtgcaatgatggct

SEQ ID NO: 883323 - DNA, 75 bp, synthetic construct
  source 1..75: mol_type = other DNA
ggggatactgtggtcagtctttatgctttttccgcaatagcccgactgggtatcgtcggtgtgctgctggtactg

SEQ ID NO: 883324 - DNA, 75 bp, synthetic construct
  source 1..75: mol_type = other DNA
aacgccgaaagcggtaaaggccgcgtatgaccttgctaacgggaaatataccgcacaggacgctaccacagcgcg

SEQ ID NO: 883325 - DNA, 75 bp, synthetic construct
  source 1..75: mol_type = other DNA
ataaatcgtttgttgaaacgctgaccacccacaaaaccagtcatttgattgcggaacacatcatcgagctggcgc

SEQ ID NO: 883326 - DNA, 75 bp, synthetic construct
  source 1..75: mol_type = other DNA
atatgacatcaccgcaggtaaaagccagctgaatatctatgtgaagactggcgctatccacgagttttcagggga

SEQ ID NO: 883327 - DNA, 75 bp, synthetic construct
  source 1..75: mol_type = other DNA
gcgcaccagcccgaaacatggccggaagacaacaccaccagcaacggccaggcgctggcggatatgtgcgccccg

SEQ ID NO: 883328 - DNA, 75 bp, synthetic construct
  source 1..75: mol_type = other DNA
gatcgctgtaaagatgagtatgacaatgccacgcttctgtgccgcaaaatcaatgagttgttgcatattcagtgc

SEQ ID NO: 883329 - DNA, 75 bp, synthetic construct
  source 1..75: mol_type = other DNA
agtgattggtatttccggacatctgctggcacctgaggtgtgtattgttgttggcgcttctggcgcagcagcgtt

SEQ ID NO: 883330 - DNA, 75 bp, synthetic construct
  source 1..75: mol_type = other DNA
caccattttaattaatgataaaggaattccagacgatattgctcttgctaatataaaaaaactagtttatcccat

SEQ ID NO: 883331 - DNA, 75 bp, synthetic construct
  source 1..75: mol_type = other DNA
actgtccgggtgatgcgaaaggcggtaatgactccaacttattgatagtgttttatgttcagataatgcccgatg

SEQ ID NO: 883332 - DNA, 75 bp, synthetic construct
  source 1..75: mol_type = other DNA
tggggtttttctacaaattgcccgggaaaagcgaaagcaaatgatgcaactaacccgtggcgtttaaagcgtacc

SEQ ID NO: 883333 - DNA, 75 bp, synthetic construct
  source 1..75: mol_type = other DNA
aaaactgcgggatgcgcggaaccccatagaacttctttactatcaggggtggtgggacctgattaacactcgctc

SEQ ID NO: 883334 - DNA, 75 bp, synthetic construct
  source 1..75: mol_type = other DNA
gtttcattccctaaaattttaaaccatcctgaacttggagttaaattacccaatatacttaatatcccaaatgaa

SEQ ID NO: 883335 - DNA, 75 bp, synthetic construct
  source 1..75: mol_type = other DNA
atcagctggcctagtgaagaagtatgaaatgcaccggaaagccatttatttcgtcctgttatcactggttccgtt

SEQ ID NO: 883336 - DNA, 75 bp, synthetic construct
  source 1..75: mol_type = other DNA
ccattgcctgattggtatggcgtgggctggcgattgaactctgcgcagttgttgcagtcggcatcgtacagcggt

SEQ ID NO: 883337 - DNA, 75 bp, synthetic construct
  source 1..75: mol_type = other DNA
caagcacggcgtgatggatggcctatcgcaaacggaagaaaaagcagccatcaacctgcactgcgatgagttcag

SEQ ID NO: 883338 - DNA, 75 bp, synthetic construct
  source 1..75: mol_type = other DNA
cgtcaggcatgggacaacgtggtacggattgccggcggcatcactgagaaaaacacaccgcgcaacctccagggg

SEQ ID NO: 883339 - DNA, 75 bp, synthetic construct
  source 1..75: mol_type = other DNA
tcaaactatcaccgttgggtcatagataacaaagataaattaggccttaaaaatagcgatgactaccattcattt

SEQ ID NO: 883340 - DNA, 75 bp, synthetic construct
  source 1..75: mol_type = other DNA
gataatgattggtatatttcaacatctacgatcgttcaaggtattacctctttaatctctacaaatgtatcaaaa

SEQ ID NO: 883341 - DNA, 75 bp, synthetic construct
  source 1..75: mol_type = other DNA
tggcatcaaaggcacactgaaaaaaatgctgctgcgtgattgcaaactacacactatcatccgtctgcccaaagg

SEQ ID NO: 883342 - DNA, 75 bp, synthetic construct
  source 1..75: mol_type = other DNA
actgccgatgcatcaactaatgataataatggcaaaacacgaggtgtaaatgttggagctggaggctcttttatt

SEQ ID NO: 883343 - DNA, 75 bp, synthetic construct
  source 1..75: mol_type = other DNA
tgacagtgggcgcgggtggcgcgggtgtgcgagtggatggggagggcaataccctgacagtgttgccgggtacac

SEQ ID NO: 883344 - DNA, 75 bp, synthetic construct
  source 1..75: mol_type = other DNA
ctaatcttgtaattgaggactgccttgacctgacaacaggtaccccggtagtcttgggagacagaaagcagcagt

SEQ ID NO: 883345 - DNA, 75 bp, synthetic construct
  source 1..75: mol_type = other DNA
acataagttttatgagaaaaactattggcattcaggcgttatttgatttattaaaagcgattgtaagtgatatca

SEQ ID NO: 883346 - DNA, 75 bp, synthetic construct
  source 1..75: mol_type = other DNA
aaaaatgtacctggacgaataccttgaaatctgcgaaacgaggaaactttcaccatccacgatcggtggttataa

SEQ ID NO: 883347 - DNA, 75 bp, synthetic construct
  source 1..75: mol_type = other DNA
agccaggttgcagcagcccaaagcgagagcgcggcagccggttctgcgacttcagcagctggatcagcaactgct

SEQ ID NO: 883348 - DNA, 75 bp, synthetic construct
  source 1..75: mol_type = other DNA
atagcgttatcctgctggttgaaggttttccgccttcacatgccggaaccattaccgtctatgaaggttccagtc

SEQ ID NO: 883349 - DNA, 75 bp, synthetic construct
  source 1..75: mol_type = other DNA
atctcccctagcaataaagaaaaaaatagagatacacctgaaaaatactcgcgtagattttatttaacatctggc

SEQ ID NO: 883350 - DNA, 75 bp, synthetic construct
  source 1..75: mol_type = other DNA
ttccgtttcgcattcaatactggtttacgcagctctgagctgtgtgcgttgcgctggcctgatctcgacaatatc

SEQ ID NO: 883351 - DNA, 75 bp, synthetic construct
  source 1..75: mol_type = other DNA
tctttatcaggaatggagaaatcttttttgtttcgcattcaatacaggcctacgaagctcagaattatgtgcatt

SEQ ID NO: 883352 - DNA, 75 bp, synthetic construct
  source 1..75: mol_type = other DNA
ctttatatcgagcctggcaacaactggataacggagcatgtgcgcaaattagacgtgtttcagaacctgatgaat

SEQ ID NO: 883353 - DNA, 75 bp, synthetic construct
  source 1..75: mol_type = other DNA
caaaactctttttgcgaaaacttaagattagcccattcatttggttgtaaaccgaactataagattaagtatcat

SEQ ID NO: 883354 - DNA, 75 bp, synthetic construct
  source 1..75: mol_type = other DNA
gggcctgacgggatttctaaccgtcagggtaaacaactggccagccgcacgctgtacctgaaacaacaggttgaa

SEQ ID NO: 883355 - DNA, 75 bp, synthetic construct
  source 1..75: mol_type = other DNA
ggctgtagtgaccgtacagcgcgtcgagcataaccgagtgaccttttaccgcgagggctatcagtcgccatgtgt

SEQ ID NO: 883356 - DNA, 75 bp, synthetic construct
  source 1..75: mol_type = other DNA
tgaaggataaaaatattgtgactttctttgatttctggggaaaaaaccgacgtggcgagaaagagggtatcgacg

SEQ ID NO: 883357 - DNA, 75 bp, synthetic construct
  source 1..75: mol_type = other DNA
gttggtgcaaccttttggttgggaaaacctgcgtcaccaacaggctcttttgcgcatggtgttttgcctgagcgc

SEQ ID NO: 883358 - DNA, 75 bp, synthetic construct
  source 1..75: mol_type = other DNA
ggatgcaggacgtcattagcaacccaaaacgactggatggaattcccgggcaaatgaatgctgtgcatatccgat

SEQ ID NO: 883359 - DNA, 75 bp, synthetic construct
  source 1..75: mol_type = other DNA
ttcaggaaggaggcatggttgtcgaagctccggcaattacgttatcaacctctgagttgatcagaatttcagatg

SEQ ID NO: 883360 - DNA, 75 bp, synthetic construct
  source 1..75: mol_type = other DNA
acttgctgcaatgaaagccattacgcttggtgtcacgcacctctggatagggacggtaaagtctgatggctctca

SEQ ID NO: 883361 - DNA, 75 bp, synthetic construct
  source 1..75: mol_type = other DNA
gtggtatggactctatatccattgcttggtggaaacgaccagatattgccattactttagattatggtcaacgtg

SEQ ID NO: 883362 - DNA, 75 bp, synthetic construct
  source 1..75: mol_type = other DNA
cgtgacaatcgacgaaaaagaatttctacgacttgggttattgctggagcaaatgttcccagaagcaacaatcca

SEQ ID NO: 883363 - DNA, 75 bp, synthetic construct
  source 1..75: mol_type = other DNA
gcaccatcgacaccagagtggacctcaatgatgcgacgtggttcacacgctgcccgtgcggagcggcctgggctt

SEQ ID NO: 883364 - DNA, 75 bp, synthetic construct
  source 1..75: mol_type = other DNA
ctaaagcgaaggccaaagacccgcaactaggcgctgatcttgatcgagaaatcaagatcctgtcatcacgtcttc

SEQ ID NO: 883365 - DNA, 75 bp, synthetic construct
  source 1..75: mol_type = other DNA
ccagaagaaaagagcaggttctaaaaatagttaaaaaactagcaggtccgtatggtataaaaagatacgagaagg

SEQ ID NO: 883366 - DNA, 75 bp, synthetic construct
  source 1..75: mol_type = other DNA
atgaaagggaaatctacattaactcttctgctcgctggtatattttcatgcggcacatgccaggcgacaggggca

SEQ ID NO: 883367 - DNA, 75 bp, synthetic construct
  source 1..75: mol_type = other DNA
ttcattccatcaacagaagcagaatggttttttgactcatggtatgcaaaatcaggtaatggtgccaacttactg

SEQ ID NO: 883368 - DNA, 75 bp, synthetic construct
  source 1..75: mol_type = other DNA
cgcacctacagcagctaccggacgaagacgcctgcgccagtgggaatttttggccccggctggaaagcgccttct

SEQ ID NO: 883369 - DNA, 75 bp, synthetic construct
  source 1..75: mol_type = other DNA
cgacccgctgccgttcattctctcccgcacctacagcagctaccggacgaagacgcctgcgccagtgggaatttt

SEQ ID NO: 883370 - DNA, 75 bp, synthetic construct
  source 1..75: mol_type = other DNA
cacaatacattttgatatacaaaaagagataaaaaatgtcacttttgagagctatttttctaaagtggcaaaact

SEQ ID NO: 883371 - DNA, 75 bp, synthetic construct
  source 1..75: mol_type = other DNA
agtgggaagacggcatctatcagattgaggtctccgaccccgttctgggcgggcctgacgggatttctaaccgtc

SEQ ID NO: 883372 - DNA, 75 bp, synthetic construct
  source 1..75: mol_type = other DNA
aagctgattgatgataataaccttactgatgactcaactataggcgactctacgtcaattctgaataatgagcag

SEQ ID NO: 883373 - DNA, 75 bp, synthetic construct
  source 1..75: mol_type = other DNA
tgggtagacatgcagcctgacgagggtcctctcttcgggatgactccaagcgcatactctagctggtttaactca

SEQ ID NO: 883374 - DNA, 75 bp, synthetic construct
  source 1..75: mol_type = other DNA
ctcgtcctcactaaatactgtctcccggttcctgcctgaagacatggacctgatgtctcgctctgagtggctggc

SEQ ID NO: 883375 - DNA, 75 bp, synthetic construct
  source 1..75: mol_type = other DNA
atgccggatttgataaatgcacacaacggattgatgagtggggtatttttacggtttcgatggcggtgcgtcgtg

SEQ ID NO: 883376 - DNA, 75 bp, synthetic construct
  source 1..75: mol_type = other DNA
cctgacgtccttcctgtcgtgggtagacatgcagcctgatgagggtcctctcttcgggatgactccgagcgccta

SEQ ID NO: 883377 - DNA, 75 bp, synthetic construct
  source 1..75: mol_type = other DNA
gtcactattgagtccggccattacgacgccattcagctgcctgacggcaccctccgcaaacatccccgcagtatc

SEQ ID NO: 883378 - DNA, 75 bp, synthetic construct
  source 1..75: mol_type = other DNA
aagctggtaaccggctatgccaagttccttgcctcattcgcgggaagtgaagcagcactcctggatgctgctgag

SEQ ID NO: 883379 - DNA, 75 bp, synthetic construct
  source 1..75: mol_type = other DNA
actcaagtcatttgacgcttttcgcgaatggataaccattcaggccggattttacaccgagcatttttatccgga

SEQ ID NO: 883380 - DNA, 75 bp, synthetic construct
  source 1..75: mol_type = other DNA
attactcaactatatgcgactctatggcaattctgagtaacgagcagggagtcagcccagaagtattcacgcagg

SEQ ID NO: 883381 - DNA, 75 bp, synthetic construct
  source 1..75: mol_type = other DNA
atgcgtcagagagagcttgcagccacagctaaggccttcatgttggataggcctgaagtctcgctacaggagctt

SEQ ID NO: 883382 - DNA, 75 bp, synthetic construct
  source 1..75: mol_type = other DNA
caaccgaaagatgccactttgacggcgctggcggggcttgctactgcggcagacaggtttccgtattttacgggg

SEQ ID NO: 883383 - DNA, 75 bp, synthetic construct
  source 1..75: mol_type = other DNA
gccctgcccgccccgctgccgttcatcctctcccgcacctacagcagttaccggacaaaaacgcccgcgccggtg

SEQ ID NO: 883384 - DNA, 75 bp, synthetic construct
  source 1..75: mol_type = other DNA
ttttgtaacaaaaagtattggtagtggagataaagaggaggggcatagatttatttttgatgatacaaaaggtga

SEQ ID NO: 883385 - DNA, 75 bp, synthetic construct
  source 1..75: mol_type = other DNA
tactgaagtgaagggagccatgatgacagttcagggaagtgctataacacaaattaaaggtggtattataaatat

SEQ ID NO: 883386 - DNA, 75 bp, synthetic construct
  source 1..75: mol_type = other DNA
gtcatgctgctggtggagacagacaaggaacggcatcaggttacgatgcgacggctggaatgttccaggaaggca

SEQ ID NO: 883387 - DNA, 75 bp, synthetic construct
  source 1..75: mol_type = other DNA
atggcaatgacgatggttgggctgggctttctcaactatggcggtgatttcgcccgttacctgccgcgcaaaacc

SEQ ID NO: 883388 - DNA, 75 bp, synthetic construct
  source 1..75: mol_type = other DNA
tgtttgcgacagcaaatattggcgtagtggtggcgatgctggtgggcgcggcgctgtatgccattttgacataca

SEQ ID NO: 883389 - DNA, 75 bp, synthetic construct
  source 1..75: mol_type = other DNA
tgcgagaagtcagcaaaagtttgtcgttgcaggatttatgccgggcgaaacggatggcaaggatgctgaaaaaac

SEQ ID NO: 883390 - DNA, 75 bp, synthetic construct
  source 1..75: mol_type = other DNA
acggtgtggtgttcccggctgaactggtgcggctgctggacagactggaggaagaaatccgggcagaccgcgtga

SEQ ID NO: 883391 - DNA, 75 bp, synthetic construct
  source 1..75: mol_type = other DNA
gccggggagcttcgcgccgctcatccgtatcgaaacagacaacggtgaacgggagaaagcgcagtgccgcagcct

SEQ ID NO: 883392 - DNA, 75 bp, synthetic construct
  source 1..75: mol_type = other DNA
ttgaaacctggaaagggccgcaggcgttgctgcgcgatattaatcgttatctgcaaggcgaagcgccggttatca

SEQ ID NO: 883393 - DNA, 75 bp, synthetic construct
  source 1..75: mol_type = other DNA
tcttctgacaatgaatttgtcagaaaaaatactgaagttattgagagcggtgttcaacttcctgtaaatacactt

SEQ ID NO: 883394 - DNA, 75 bp, synthetic construct
  source 1..75: mol_type = other DNA
ctgaaagaattaaataatccagagcatgacagttacgcaatgagtgaaaagagtcacggcagagaagaaatccgt

SEQ ID NO: 883395 - DNA, 75 bp, synthetic construct
  source 1..75: mol_type = other DNA
aggatttcgcaaatatggaaattcttcagcaggatatgagtaatttatcaaaaaacgcgcgaacaaatgcttaca

SEQ ID NO: 883396 - DNA, 75 bp, synthetic construct
  source 1..75: mol_type = other DNA
ttcaccaccaatatttgcctgacccaggaaaaccagaaaaacagaaacgcgacagccacatttatccttttgatt

SEQ ID NO: 883397 - DNA, 75 bp, synthetic construct
  source 1..75: mol_type = other DNA
ggatagagatgcttcttaaagaaggcaatgttttatttattgttcttgcttgtttgattgtcttttttactttaa

SEQ ID NO: 883398 - DNA, 75 bp, synthetic construct
  source 1..75: mol_type = other DNA
gtattgtcgcttctattccaagtgctggagcaagctttgctggagcagtggcacttattggaggaatagcggggg

SEQ ID NO: 883399 - DNA, 75 bp, synthetic construct
  source 1..75: mol_type = other DNA
ctgtagtattaggtgttgatattatctgtcaaatcgttctgggcaccacggctaccggttggattttaggaaaac

SEQ ID NO: 883400 - DNA, 75 bp, synthetic construct
  source 1..75: mol_type = other DNA
cagtaatgattggtgcagctgtaatatgttctgtagcaataggggccgttgtttctgcattatcaaaaacagccg

SEQ ID NO: 883401 - DNA, 75 bp, synthetic construct
  source 1..75: mol_type = other DNA
ctgcaactgcaacaaaactgcaaacagcacgcacaataggcggagtgtcattcgatggtagtgccaatatcgacc

SEQ ID NO: 883402 - DNA, 75 bp, synthetic construct
  source 1..75: mol_type = other DNA
aatgattatgtagatgccaatggttggaagtttggaaaactcaccaatgcgatttatcagagcattttccatgag

SEQ ID NO: 883403 - DNA, 75 bp, synthetic construct
  source 1..75: mol_type = other DNA
tgacgataaaaaataataatataactctctatctggagcagcgtaccttaccaagcattgcaaatgtagttgagt

SEQ ID NO: 883404 - DNA, 75 bp, synthetic construct
  source 1..75: mol_type = other DNA
agcgtgcaaggtaagcgcaatcatgtcgctgctgcataaatctatcggcgagctggtgaaagcgcgggaggctta

SEQ ID NO: 883405 - DNA, 75 bp, synthetic construct
  source 1..75: mol_type = other DNA
ataccgccactggatgggaacgggaactgtcggtgtgatgattgccggcagtgacctgattaatcccattccgga

SEQ ID NO: 883406 - DNA, 75 bp, synthetic construct
  source 1..75: mol_type = other DNA
ggaccgctggggacgccagtacaggcgcgctggggtatgctgggagatgggaaaacggcgatcgttgaaatggcc

SEQ ID NO: 883407 - DNA, 75 bp, synthetic construct
  source 1..75: mol_type = other DNA
ccacggctacaggttggattttaggaaaacttactgagggtcttgcgggtattatttcaaaatatgaccccacgc

SEQ ID NO: 883408 - DNA, 75 bp, synthetic construct
  source 1..75: mol_type = other DNA
atcaccagattcgtcagcttactgaccgggctaaaaacctgcgcagtcatctgagcaaaatagatgttctggcga

SEQ ID NO: 883409 - DNA, 75 bp, synthetic construct
  source 1..75: mol_type = other DNA
tttgacggcgcattgaccattctcaccctgggatgtacttatgatatttgcctggtggtgacggggcagtatcgc

SEQ ID NO: 883410 - DNA, 75 bp, synthetic construct
  source 1..75: mol_type = other DNA
atgcaacttaccaacgaagaacaagcacagattgctcgtataaaagaaaaaatcccacgcattgccgcactggat

SEQ ID NO: 883411 - DNA, 75 bp, synthetic construct
  source 1..75: mol_type = other DNA
gcatggaatcggtgctgtgtaacgaatcagactttggcctgatgaatcccctaatgattttggtaaaaatcatta

SEQ ID NO: 883412 - DNA, 75 bp, synthetic construct
  source 1..75: mol_type = other DNA
tgaagtgcaccgggcgcgggtgatggaaaaaatgcaggcaggaagtcttgctgagctcgttaatcgacttcagag

SEQ ID NO: 883413 - DNA, 75 bp, synthetic construct
  source 1..75: mol_type = other DNA
acggacgggtacgggaactggtgatcaaatccaagaacctgcgtagcagtctgagttcgattgatatcaccacca

SEQ ID NO: 883414 - DNA, 75 bp, synthetic construct
  source 1..75: mol_type = other DNA
ctgaatgtatttggtagtaaatctgttcagaaaaaactactcaatcacttggttgcagtttgccgtataggtgca

SEQ ID NO: 883415 - DNA, 75 bp, synthetic construct
  source 1..75: mol_type = other DNA
gagcgccagaggagctctataccgtcgacagtttctttggccataccattgaagagtatcttattccgttcgaaa

SEQ ID NO: 883416 - DNA, 75 bp, synthetic construct
  source 1..75: mol_type = other DNA
gctctgaccgcccgccagtattatgaaaaacaactcggtagccttgagaaaacaatcaatcaggcaaacgcacgt

SEQ ID NO: 883417 - DNA, 75 bp, synthetic construct
  source 1..75: mol_type = other DNA
tgctatttcgtgaattacaagatgcagttcttgaactcaatgaaggggaattggaaaaaattatttcaggcgagt

SEQ ID NO: 883418 - DNA, 75 bp, synthetic construct
  source 1..75: mol_type = other DNA
gaaacacttgcggatctggataaacatcgggcaattaacttttttagcgaccacagtcgtgacgtcatggaatgg

SEQ ID NO: 883419 - DNA, 75 bp, synthetic construct
  source 1..75: mol_type = other DNA
agtgatgtatcccgacaggcgctacctttctccaaaagtgcgcgtctttatcgactggttcagtgatattctggc

SEQ ID NO: 883420 - DNA, 75 bp, synthetic construct
  source 1..75: mol_type = other DNA
tccgatctggctcggccagcgcgcttggagctttgatcggcgtttcaaaaatggctgtttcgctgtggcgccgta

SEQ ID NO: 883421 - DNA, 75 bp, synthetic construct
  source 1..75: mol_type = other DNA
ccgaaaaggttactgaacaagattgatacctacgtgcgcaataacccagactacgccaacagaagtgcgtttctg

SEQ ID NO: 883422 - DNA, 75 bp, synthetic construct
  source 1..75: mol_type = other DNA
atgtttaatgtgattactcacccagccgcactggatgaactgctggaattaccagacaatctgcgtggtcgtatg

SEQ ID NO: 883423 - DNA, 75 bp, synthetic construct
  source 1..75: mol_type = other DNA
gtccgtgagtccggatgtgacagggcagtatacccgtcctgtgcttgaacgtttactgctgcggacctggctgcg

SEQ ID NO: 883424 - DNA, 75 bp, synthetic construct
  source 1..75: mol_type = other DNA
gctggaggcgctcgagccggactttattcccatgaccagtgatgagagcaacaggctgaatcagggcgtgtttgt

SEQ ID NO: 883425 - DNA, 75 bp, synthetic construct
  source 1..75: mol_type = other DNA
atgtttaatgtgattactcacccgaccgcactggatgagctgctggaattaccagacaatctgcgtggttgcatg

SEQ ID NO: 883426 - DNA, 75 bp, synthetic construct
  source 1..75: mol_type = other DNA
ttcctggctctgtggaaaaacatctggctcagcgggcgcaggactttattggcgggcaatggctgctggtggata

SEQ ID NO: 883427 - DNA, 75 bp, synthetic construct
  source 1..75: mol_type = other DNA
tcgctttgcctggaggttctgatgcagatgtgaaagatgtcattacttatgttgaagatgttttttttaatacta

SEQ ID NO: 883428 - DNA, 75 bp, synthetic construct
  source 1..75: mol_type = other DNA
ggtgggcttttgttggtttcatggcttacgccactttgattaagccggacaacactgatccagctgttgtgaact

SEQ ID NO: 883429 - DNA, 75 bp, synthetic construct
  source 1..75: mol_type = other DNA
tctataaatcacaagaatacctggcaacgttgggcacaattgaataccgatcattgtttggtagttacagcctga

SEQ ID NO: 883430 - DNA, 75 bp, synthetic construct
  source 1..75: mol_type = other DNA
attgtagacatctacgatcctgaaaaaataaaaatcacaaatagactcgtccatgaattttctaataattttttg

SEQ ID NO: 883431 - DNA, 75 bp, synthetic construct
  source 1..75: mol_type = other DNA
gtatcgcgcgaaacgcgaagacgcaatatggttacgctggtcgtcttacacgatatcaatatcgcactgcggcat

SEQ ID NO: 883432 - DNA, 75 bp, synthetic construct
  source 1..75: mol_type = other DNA
atgagcgggcttacgattaatgcgctgtgcgccggttacggcaaacggcggattattgagcatctgtcgatttct

SEQ ID NO: 883433 - DNA, 75 bp, synthetic construct
  source 1..75: mol_type = other DNA
tatccggacggcagatggaaaccaaagaagtggatgcagagcgaatgctgcatcttaaatttgttcgccgtctgc

SEQ ID NO: 883434 - DNA, 75 bp, synthetic construct
  source 1..75: mol_type = other DNA
cagattttaaaattaaaatcaataatgcagtagagaaggcttcgtcaattgtgttatgtgctgtgcaaaaaaatc

SEQ ID NO: 883435 - DNA, 75 bp, synthetic construct
  source 1..75: mol_type = other DNA
ggaaggtgaggagcaactgtgcgattgtgttaacgaactgaaactcgggttgtcgagtaataatgaatatggcct

SEQ ID NO: 883436 - DNA, 75 bp, synthetic construct
  source 1..75: mol_type = other DNA
aaatacagttccgtttgcgtgtttgaccaccattttagcgacagcgataaatgaaacttctggggggatacgaat

SEQ ID NO: 883437 - DNA, 75 bp, synthetic construct
  source 1..75: mol_type = other DNA
ttttatcggcgttcagataaaaaccacctcacgcaaaatgaagagaaggttaagcgtacaaataccttataaaaa

SEQ ID NO: 883438 - DNA, 75 bp, synthetic construct
  source 1..75: mol_type = other DNA
taaagggtaggcctttagcaggcgatgaggcttttggtgtgattttggctgatgatttgtgtatcaatgaagagg

SEQ ID NO: 883439 - DNA, 75 bp, synthetic construct
  source 1..75: mol_type = other DNA
ttgatcaacagggatattttaactgcgattcattaacagccgaagaattaatgatattaaaagacctttttgata

SEQ ID NO: 883440 - DNA, 75 bp, synthetic construct
  source 1..75: mol_type = other DNA
atgttaccggaacagcacgccgcagaagcgcgctatcctattcctgttgaggatttccatttcagtattttcact

SEQ ID NO: 883441 - DNA, 75 bp, synthetic construct
  source 1..75: mol_type = other DNA
acccgaaggtgaagaaaaggccggttcgcggcgggtgggtgaactggatgaggagatggtatatgagtcgcgggt

SEQ ID NO: 883442 - DNA, 75 bp, synthetic construct
  source 1..75: mol_type = other DNA
gaaggttacaacatcctgcagcagtggtttgtcggtcagcacagtcgtccggtgtatcgtgcctggctggcgatg

SEQ ID NO: 883443 - DNA, 75 bp, synthetic construct
  source 1..75: mol_type = other DNA
tccgagatttatctggtttttccgaatcggatatgtatgcagtgggcggaacgggaacggtttatcactttaatg

SEQ ID NO: 883444 - DNA, 75 bp, synthetic construct
  source 1..75: mol_type = other DNA
gctgtacctgaaggggactttgaacgtttcttgggtgagaaaagtaaatcacttgaagagcgcctgaacgaccca

SEQ ID NO: 883445 - DNA, 75 bp, synthetic construct
  source 1..75: mol_type = other DNA
attttgcgcgctttatattactggtgccgcaggaaggcgtcacccacaacgcccagggtaaagcaacggcgctca

SEQ ID NO: 883446 - DNA, 75 bp, synthetic construct
  source 1..75: mol_type = other DNA
caaaatcatggaacaatgataatggataatctacgggctatggcaaatgtgacaatcgagcctgatgcaactctg

SEQ ID NO: 883447 - DNA, 75 bp, synthetic construct
  source 1..75: mol_type = other DNA
ggggagcagcacatttccagtgggggaagtgcgattaacaccacactggatggctatcagacagttttcaatggt

SEQ ID NO: 883448 - DNA, 75 bp, synthetic construct
  source 1..75: mol_type = other DNA
ccagcggtggtagtgctgtagacaccaccattgagggaggggcttcagattgttctcaatggcggaaatgtctct

SEQ ID NO: 883449 - DNA, 75 bp, synthetic construct
  source 1..75: mol_type = other DNA
ggatcagataaccacatcagcagcaaaggagcgggttactccctgacccaatacggaatagtgacgggcggagat

SEQ ID NO: 883450 - DNA, 75 bp, synthetic construct
  source 1..75: mol_type = other DNA
taattagcggaggagaacagtatatttccgatggtggcagtgcgactaataccgttatcgatgggggaactcaat

SEQ ID NO: 883451 - DNA, 75 bp, synthetic construct
  source 1..75: mol_type = other DNA
tttgttttgaatatcaaaaataccggtcaggagcctgtatccccgggtaacccattaccagtggtttataccggt

SEQ ID NO: 883452 - DNA, 75 bp, synthetic construct
  source 1..75: mol_type = other DNA
tgacaaaaataatcactttttgcattaccgctggcaagctgcggaatgggccggacaatctgccaggttacttca

SEQ ID NO: 883453 - DNA, 75 bp, synthetic construct
  source 1..75: mol_type = other DNA
tttctatactaaattagtcggcgagcgtactgcggaattggatgaagtaacctatggtacgatgattagcgtgct

SEQ ID NO: 883454 - DNA, 75 bp, synthetic construct
  source 1..75: mol_type = other DNA
ttcgtgtctttcttattgagccaagagagatcgatgagcgcatgatgaataatgcgaatgaggctgcggttgacg

SEQ ID NO: 883455 - DNA, 75 bp, synthetic construct
  source 1..75: mol_type = other DNA
cacatttccagtgggggaagtgcgattaacaccacactggatggctatcagacagttttcaatggtggcaacgca

SEQ ID NO: 883456 - DNA, 75 bp, synthetic construct
  source 1..75: mol_type = other DNA
ggccagtatgttacagagttaaagctaaagaaagcctttgagcttttagcaacaacaaaaaaaccaataatggat

SEQ ID NO: 883457 - DNA, 75 bp, synthetic construct
  source 1..75: mol_type = other DNA
tgccttatctcaagttatccgaagttgcgcgtacaccggctagaagcatatatcacgttaagagaggaattgccg

SEQ ID NO: 883458 - DNA, 75 bp, synthetic construct
  source 1..75: mol_type = other DNA
agctagtctccagcggtggtagtgccgtagatacaaccattgagggggggctgcagaccattctcaatggcggaa

SEQ ID NO: 883459 - DNA, 75 bp, synthetic construct
  source 1..75: mol_type = other DNA
ccgtctatcccgactgcttcctgatgcgtatattaaaggttatatggacgaggtgttaagtgaaatgtcacctga

SEQ ID NO: 883460 - DNA, 75 bp, synthetic construct
  source 1..75: mol_type = other DNA
ctcaccctgcagtatgtggcttccagggttcatgttacggccgctcatctttcccggcagttcactcgtgatatc

SEQ ID NO: 883461 - DNA, 75 bp, synthetic construct
  source 1..75: mol_type = other DNA
ttgcatcatttcatgaccttatggatttcattaattgccatttactttgtaaagatgacattgttgcaaaacgcg

SEQ ID NO: 883462 - DNA, 75 bp, synthetic construct
  source 1..75: mol_type = other DNA
agcagaacagaacgacccgtaacaatggatatactgataataccagttacatagcaaccagctatgcctctccct

SEQ ID NO: 883463 - DNA, 75 bp, synthetic construct
  source 1..75: mol_type = other DNA
gcatggctacgaagaagagaagtggagaagagataaatgaccgacaaatcttatgcgggatgggaattaaactac

SEQ ID NO: 883464 - DNA, 75 bp, synthetic construct
  source 1..75: mol_type = other DNA
atcccgtcatgatattggttcgcacgcgggaagttattccgtcaggatgacttatacgttccgggatgtgttccg

SEQ ID NO: 883465 - DNA, 75 bp, synthetic construct
  source 1..75: mol_type = other DNA
atgtagtagcacaagatcgcctttttcagatggaaatggcacgtcgcagtactcaagggactgtcgcggaagtgc

SEQ ID NO: 883466 - DNA, 75 bp, synthetic construct
  source 1..75: mol_type = other DNA
gccagtatatggggagaggctaattatttaaaaggtaacaatgtagagtcaccggtaacagggactgttggcttc

SEQ ID NO: 883467 - DNA, 75 bp, synthetic construct
  source 1..75: mol_type = other DNA
ttacttccttatgcccgaacaacagctcttgctgtgaatgatgacaatatcagtctatctaatggaatgaaggct

SEQ ID NO: 883468 - DNA, 75 bp, synthetic construct
  source 1..75: mol_type = other DNA
cacatagtgcgctgggttatcgctctccacgggaatatctgcggcggcgggccagtaatgggttaagtgatacca

SEQ ID NO: 883469 - DNA, 75 bp, synthetic construct
  source 1..75: mol_type = other DNA
tcagttttaccaggggcgaaacagatccctcattgcacatgaaatgggtattaaaactattccggttatgatacc

SEQ ID NO: 883470 - DNA, 75 bp, synthetic construct
  source 1..75: mol_type = other DNA
gacgcaacagaatgcttctctggtagaagaggcctcagcagcggcggtgtcccttgaagaacaggcggcacgatt

SEQ ID NO: 883471 - DNA, 75 bp, synthetic construct
  source 1..75: mol_type = other DNA
gatacgaatacctatgaaagtcgcaagatcccaatattaggcagtattccatttattggtaaattatttggatat

SEQ ID NO: 883472 - DNA, 75 bp, synthetic construct
  source 1..75: mol_type = other DNA
aataaaataggtgttatacatctcattaacactttcgtgaacgatcgaaattatgatttacgcggtgagcatatt

SEQ ID NO: 883473 - DNA, 75 bp, synthetic construct
  source 1..75: mol_type = other DNA
aggagggacgcaaatatggcgtatacctcacactatctagtcagcggcctgccgatatttcacctactattgttt

SEQ ID NO: 883474 - DNA, 75 bp, synthetic construct
  source 1..75: mol_type = other DNA
catatctttgttggcacctaccccaacgacccgatactcagcgtgatgttgacgaagtgtgcgctcgcttcccga

SEQ ID NO: 883475 - DNA, 75 bp, synthetic construct
  source 1..75: mol_type = other DNA
gctaggacacgttaacgaatttttccaagtaacaaacggatggattaccaaaaccgaacaaaaccgaattaatgc

SEQ ID NO: 883476 - DNA, 75 bp, synthetic construct
  source 1..75: mol_type = other DNA
gcgctattcagtatttacagcaaatcacgcccgtcgtcattgaggggcaatcttcgccagaaatacggcaaatac

SEQ ID NO: 883477 - DNA, 75 bp, synthetic construct
  source 1..75: mol_type = other DNA
tgaccgcgttaaaaaggccttgcgcgatggtaaaaatagcgaagctgttgatgaggaaacattgcgtttgctgat

SEQ ID NO: 883478 - DNA, 75 bp, synthetic construct
  source 1..75: mol_type = other DNA
ttccgaaaggaacaacgccgacgacgcacatcattaaattaccgattggcgaaatcaggcagcccaatgcgacgc

SEQ ID NO: 883479 - DNA, 75 bp, synthetic construct
  source 1..75: mol_type = other DNA
cgctacgccgatggcagccaattcaacgtttactttgtcgccttcgtcctagattttggctgctatgttaaagtc

SEQ ID NO: 883480 - DNA, 75 bp, synthetic construct
  source 1..75: mol_type = other DNA
gcttgtgaaatactttagacaggccactaggattgatcaaataaattttactattgaaacttatcaaagtcgaca

SEQ ID NO: 883481 - DNA, 75 bp, synthetic construct
  source 1..75: mol_type = other DNA
cggcacactgaacctgatggatgcgacatcatcgttcgatactgtaggtatcaatgtcggtaattttggtagcgg

SEQ ID NO: 883482 - DNA, 75 bp, synthetic construct
  source 1..75: mol_type = other DNA
ataagcaatttggcatctacatgattaataactcaaggacagccaatggcaccgatggtcaggcgtacatggata

SEQ ID NO: 883483 - DNA, 75 bp, synthetic construct
  source 1..75: mol_type = other DNA
cacggtgtcgtcaacgtgaccgataaagggcattggaatttcctcggaacgggcgaagtctggagaatggtggca

SEQ ID NO: 883484 - DNA, 75 bp, synthetic construct
  source 1..75: mol_type = other DNA
ggatttgataataagtggcgatatgtagctgattatgatttaatgttacgggcatattttacaaaaagaagattt

SEQ ID NO: 883485 - DNA, 75 bp, synthetic construct
  source 1..75: mol_type = other DNA
ttgagtttccccggttttaacggcgacgttcacgcgctcaacaatgtgtcattgaaaatcaaccgcggtgaaatt

SEQ ID NO: 883486 - DNA, 75 bp, synthetic construct
  source 1..75: mol_type = other DNA
cagggacggtaccaaacctcacccatttgcctgacggctgcgcttttcgcgatcgttgctatgcggcaggtgcac

SEQ ID NO: 883487 - DNA, 75 bp, synthetic construct
  source 1..75: mol_type = other DNA
aacagcttcgtcagtggcgcggcgcacgagtggcgatgatctttcaggaaccgatgaccgccctcaatccgacac

SEQ ID NO: 883488 - DNA, 75 bp, synthetic construct
  source 1..75: mol_type = other DNA
acaatttgttgccaattccaacaagatgaccgccgttggcgcgtgcgggctgatcgtcaccgcgttattgttgat

SEQ ID NO: 883489 - DNA, 75 bp, synthetic construct
  source 1..75: mol_type = other DNA
aatgatgttgccagcctggcgaccctgacaaaagtcgggcgggatattctggctaaatcgaccgttgccgccgtt

SEQ ID NO: 883490 - DNA, 75 bp, synthetic construct
  source 1..75: mol_type = other DNA
tacaggaaacggtaaacaaggctggtaacgccgtccaaaagacaggcgatatcttgtccggtgggcttacttttg

SEQ ID NO: 883491 - DNA, 75 bp, synthetic construct
  source 1..75: mol_type = other DNA
atatcatgtgatctgtgatacagataaagcagaaatagttaccgtagatcaatctggcaatgcagattttgattc

SEQ ID NO: 883492 - DNA, 75 bp, synthetic construct
  source 1..75: mol_type = other DNA
ccatcgttatgttggcggggggcatgtttgcgtcactgaatgcagctgccgatgattccgtttttactgtcatgg

SEQ ID NO: 883493 - DNA, 75 bp, synthetic construct
  source 1..75: mol_type = other DNA
cagtaaaaaaacacacacagattcgtgatgaacgttttttcaaaaccaataactctcaatatgatttagttaacg

SEQ ID NO: 883494 - DNA, 75 bp, synthetic construct
  source 1..75: mol_type = other DNA
aacagctgcatttgagtttccccggttttaacggtgatgttcacgcgctcaacaatgtgtccttgcagattaacc

SEQ ID NO: 883495 - DNA, 75 bp, synthetic construct
  source 1..75: mol_type = other DNA
agagtatttcattagaactggtaaaaattctcataccccatttgaagtttttataaaggagcgattatttaatca

SEQ ID NO: 883496 - DNA, 75 bp, synthetic construct
  source 1..75: mol_type = other DNA
gagtgatagaagcatatcaaaactctgttaatggatatttcaataaaatattttttgatacatcaatatgtttta

SEQ ID NO: 883497 - DNA, 75 bp, synthetic construct
  source 1..75: mol_type = other DNA
aaaacccaaatccggcgcggcatattcggcagcgtcgagcaatacaccgaagccctgcaagagcaggaacaagca

SEQ ID NO: 883498 - DNA, 75 bp, synthetic construct
  source 1..75: mol_type = other DNA
atcagtaccaacttcgtcttgctcatgaatttagaaagcagcttgaagaacaggctcgtaaagatggagatacct

SEQ ID NO: 883499 - DNA, 75 bp, synthetic construct
  source 1..75: mol_type = other DNA
gaaaaattagcacagttgccagccgaatgtgtcgaggcagaagacaatgcaatgatgccatggctggttgttggt

SEQ ID NO: 883500 - DNA, 75 bp, synthetic construct
  source 1..75: mol_type = other DNA
caatcatcatcataattcttctgaacctgatgatggtggtaatacgcctgtaccgccagacgatggcggtgacac

SEQ ID NO: 883501 - DNA, 75 bp, synthetic construct
  source 1..75: mol_type = other DNA
agaacaagaggaacctaccgagaaattgatacttgatcatgaggcagtagaagatcttcagagatatgtaaaaga

SEQ ID NO: 883502 - DNA, 75 bp, synthetic construct
  source 1..75: mol_type = other DNA
tgctacttgaggaacccaaacactatcctgcatttattgttatgcaagagttagcttattggtgtaaagatcctg

SEQ ID NO: 883503 - DNA, 75 bp, synthetic construct
  source 1..75: mol_type = other DNA
caggctcgtaaagatggagatacctctctcgcaacatggataaaacgcgttttgcgtaaggaacttcagtcacga

SEQ ID NO: 883504 - DNA, 75 bp, synthetic construct
  source 1..75: mol_type = other DNA
gttacgctcacggttaacagtgggtgatagttataccgatggcgatatttttgacagtgtgaactttcgtggcct

SEQ ID NO: 883505 - DNA, 75 bp, synthetic construct
  source 1..75: mol_type = other DNA
accaaactctgcaggatcttgtgctgactatacatcattgctacatgcattcatttggtacgagtcctgctgcga

SEQ ID NO: 883506 - DNA, 75 bp, synthetic construct
  source 1..75: mol_type = other DNA
tggcaatttactcttcaaaagctaaacccgactctcattggtgaatgtgaaaaggctattgtttgggctaatgaa

SEQ ID NO: 883507 - DNA, 75 bp, synthetic construct
  source 1..75: mol_type = other DNA
gtgccggatgatggcggtgatacacccgtcccgccggatgatggcggtgacacgccagtcccgccggacgatggc

SEQ ID NO: 883508 - DNA, 75 bp, synthetic construct
  source 1..75: mol_type = other DNA
cgttatgacgacatcaaaggcgatcaccttgtcctgtcccaacagaaaacgggtgaatctgtccgggttaggctc

SEQ ID NO: 883509 - DNA, 75 bp, synthetic construct
  source 1..75: mol_type = other DNA
attacaacgcgcaatagctaacggtttaaccgaaaaagatattgtcatggaaatggtcaaaagaatggataatcc

SEQ ID NO: 883510 - DNA, 75 bp, synthetic construct
  source 1..75: mol_type = other DNA
cgcaacaatgcatggcgatcagcggatgcgacgcactgagagatcccctcataatttccccaaagcgtaaccatg

SEQ ID NO: 883511 - DNA, 75 bp, synthetic construct
  source 1..75: mol_type = other DNA
cgacggcctgttgcagggaaccggggcgctgacgcttgccggggatacgctctcgcaggggatcaacgggcgctg

SEQ ID NO: 883512 - DNA, 75 bp, synthetic construct
  source 1..75: mol_type = other DNA
tatcccctgccatccggcaacaacggctactttgtgccgtccaccgatccggacagcccgtatctgatcaccgtt

SEQ ID NO: 883513 - DNA, 75 bp, synthetic construct
  source 1..75: mol_type = other DNA
tcagcctgacagggagcaccctcaacaaccagagctggcagtccggttcggtcactgactggttcgtttatcagt

SEQ ID NO: 883514 - DNA, 75 bp, synthetic construct
  source 1..75: mol_type = other DNA
aacagactaatgcggaaccagaagaacaggttgatccgcgcaaagcggcagttgccgcggctattgcccgcgctc

SEQ ID NO: 883515 - DNA, 75 bp, synthetic construct
  source 1..75: mol_type = other DNA
ttaattaagaatgtaattatcagatggatatttattgttatatggatagttccggcagatatcgtacttatattc

SEQ ID NO: 883516 - DNA, 75 bp, synthetic construct
  source 1..75: mol_type = other DNA
taaataacgctttctatccaacatcaatgaaagaagattatatttctggaaattgctggcctactgatggtgttg

SEQ ID NO: 883517 - DNA, 75 bp, synthetic construct
  source 1..75: mol_type = other DNA
tgttcggtttttaggagagcttccagaaaataccaccacaattgcgccagaaactcaatttgatgtctggaatgg

SEQ ID NO: 883518 - DNA, 75 bp, synthetic construct
  source 1..75: mol_type = other DNA
gtttatccgacaaataaattgcctgatttacgtggtgagtttattcgtggctgggatgatgggcgtggtattgat

SEQ ID NO: 883519 - DNA, 75 bp, synthetic construct
  source 1..75: mol_type = other DNA
caatagtaataacaaagagcattgccagtggctctgggacgaaatgcataagcgatgtatcggtgttccattcct

SEQ ID NO: 883520 - DNA, 75 bp, synthetic construct
  source 1..75: mol_type = other DNA
ggaagagacgaagaccaaaaaagggttccttagcaagaaaacgacccacaccatcgaggaagacagcgcaacgcg

SEQ ID NO: 883521 - DNA, 75 bp, synthetic construct
  source 1..75: mol_type = other DNA
ccgctataaaaatagccgaggaaaatggtatatcattagaaggccataaaggaaggcaattaacacgagaaatga

SEQ ID NO: 883522 - DNA, 75 bp, synthetic construct
  source 1..75: mol_type = other DNA
atcagagaaataataagggatgaatatttacgtgatacatccgctcttattttactcgttgggactgagactaaa

SEQ ID NO: 883523 - DNA, 75 bp, synthetic construct
  source 1..75: mol_type = other DNA
gggcctgggttgcagcatttaatacaaatgtcagatgacgataaaaatggtcttatgtcagccattaacggctta

SEQ ID NO: 883524 - DNA, 75 bp, synthetic construct
  source 1..75: mol_type = other DNA
gtcagatactgccggcagacctgtcacgtgaaacccggcgcatcccccccgacagagactgtctgcccgaaatgc

SEQ ID NO: 883525 - DNA, 75 bp, synthetic construct
  source 1..75: mol_type = other DNA
atatttactacacagcaagaataaatgaatctttaagttatgcaggcgttcattctaatttaaattactataatc

SEQ ID NO: 883526 - DNA, 75 bp, synthetic construct
  source 1..75: mol_type = other DNA
cagaataaagcggggtccacatttaatacaacagtaactaatggcggggcttatccggcacactgtcactgtaat

SEQ ID NO: 883527 - DNA, 75 bp, synthetic construct
  source 1..75: mol_type = other DNA
ctgcaccgcaaagctgtgaaattaacagtttaagacccattaattttgattttaaagaaattcctgcagcagatt

SEQ ID NO: 883528 - DNA, 75 bp, synthetic construct
  source 1..75: mol_type = other DNA
cgttctaatgtaaactactttaatttgaatcctaatctggatgttggaatatcgatagaccttctcggtgtagga

SEQ ID NO: 883529 - DNA, 75 bp, synthetic construct
  source 1..75: mol_type = other DNA
ttatcctgctcactgccattgtgatacagggaaagtgggggagtttccttatatttactatacagcgagaataaa

SEQ ID NO: 883530 - DNA, 75 bp, synthetic construct
  source 1..75: mol_type = other DNA
ttgataaaaaagtgtatgaaacctggataacactggcgggagacgtctggaaattgatgctcacaccttattcac

SEQ ID NO: 883531 - DNA, 75 bp, synthetic construct
  source 1..75: mol_type = other DNA
ggcgcgagtatccctccacccaggcggatgctttaatattgcaatggtgccgtcagcatcgggtcgattattacc

SEQ ID NO: 883532 - DNA, 75 bp, synthetic construct
  source 1..75: mol_type = other DNA
caatgcccgttgacgatggtgggccaggctgtctgggcatcattaaaattattttctatatttttatctttgctg

SEQ ID NO: 883533 - DNA, 75 bp, synthetic construct
  source 1..75: mol_type = other DNA
ttttgctacagtagatatgacggtagatgctaaagcaattaaaaaacaattgctggcaatagcccatgattgtgc

SEQ ID NO: 883534 - DNA, 75 bp, synthetic construct
  source 1..75: mol_type = other DNA
aacatacagcatcacgtattcccatgcgaaatatctggatgctgatgctgtacgcttcagatctgtttcgtcagt

SEQ ID NO: 883535 - DNA, 75 bp, synthetic construct
  source 1..75: mol_type = other DNA
atggaatttaatataaagttaacgtttgtttttattatgtgtatgattcttaattttaacgtagcagcgaaagaa

SEQ ID NO: 883536 - DNA, 75 bp, synthetic construct
  source 1..75: mol_type = other DNA
taggtattctgaataccgatgatatcagtacgtctttttatgctaccgaacccagtactgataactcgatggttg

SEQ ID NO: 883537 - DNA, 75 bp, synthetic construct
  source 1..75: mol_type = other DNA
ccatcgacgcgtcgccccgctggattatcgcgagcctgccgctgcgggctcgggctaccccaaaatggctcctga

SEQ ID NO: 883538 - DNA, 75 bp, synthetic construct
  source 1..75: mol_type = other DNA
cttttgactgaaagaaggcaactcggggatcaaacgtcccggcttgtaggacaactttcagtcattcaaccaacc

SEQ ID NO: 883539 - DNA, 75 bp, synthetic construct
  source 1..75: mol_type = other DNA
gattcgttctatcgggcaataaacagacattctcattcagatggccggaacatactatctacaggcattatggat

SEQ ID NO: 883540 - DNA, 75 bp, synthetic construct
  source 1..75: mol_type = other DNA
ggtgcagaagtacgccatcttactcagatgactgatgatgataagaacgggttgatgacagccatcaatggttta

SEQ ID NO: 883541 - DNA, 75 bp, synthetic construct
  source 1..75: mol_type = other DNA
gcgagatgacggctctcgcccagaagagtccgatggatgaggttcgccgtaaatatttattacaactgtctaatc

SEQ ID NO: 883542 - DNA, 75 bp, synthetic construct
  source 1..75: mol_type = other DNA
tttggtggtgtttgtgctttgtgctacctgatctataacatcatcatggcattcatggagaagaaaagctggtct

SEQ ID NO: 883543 - DNA, 75 bp, synthetic construct
  source 1..75: mol_type = other DNA
aaaggcgtgttcgacgttacaacaaataaagcactccaagcgcatatagacagatatactaaagctggtgtgtat

SEQ ID NO: 883544 - DNA, 75 bp, synthetic construct
  source 1..75: mol_type = other DNA
ggcagcgcatcagttatactttctctgccagccaatcctatgatgaaaacgataaagaagaggagcgttttaatc

SEQ ID NO: 883545 - DNA, 75 bp, synthetic construct
  source 1..75: mol_type = other DNA
aatttcttatgtgcagtttacaactgaccaacgtaagccctggtatatacaggcactgcgtcccgatggttcgcc

SEQ ID NO: 883546 - DNA, 75 bp, synthetic construct
  source 1..75: mol_type = other DNA
tctgcgggctggcaccggataagtgaagagactgaccagtatgccggaggccaccggctgaaacaggccggaaac

SEQ ID NO: 883547 - DNA, 75 bp, synthetic construct
  source 1..75: mol_type = other DNA
tgaatccctgctgaaaaccacgtaccgctacaacgcagccggagaactggcagaggtcatcctgccggaggatga

SEQ ID NO: 883548 - DNA, 75 bp, synthetic construct
  source 1..75: mol_type = other DNA
aaactgtacagcgtacggcacctggtgtttaacggctttgagctgataagccagcagtgcagccgggtacggcag

SEQ ID NO: 883549 - DNA, 75 bp, synthetic construct
  source 1..75: mol_type = other DNA
gaaaacgccgataattgcgccaccttccaatgctgaaccaaaggcacaatgcatcttccataatttagtccactg

SEQ ID NO: 883550 - DNA, 75 bp, synthetic construct
  source 1..75: mol_type = other DNA
ctgacaactcttctgtcactctcggtagtaaggatatttacattgataaaaatgacagtaatgaaaaagaagtaa

SEQ ID NO: 883551 - DNA, 75 bp, synthetic construct
  source 1..75: mol_type = other DNA
aaaagctgtcaggtaaggacaatattctgctggttgattttctgaacaaacccaccggagaaaaactggatattg

SEQ ID NO: 883552 - DNA, 75 bp, synthetic construct
  source 1..75: mol_type = other DNA
tcatcaatgaacatgtttttaaatttaaagatagttttgatcatttcctcgaggcagtgatctctatttcaggtt

SEQ ID NO: 883553 - DNA, 75 bp, synthetic construct
  source 1..75: mol_type = other DNA
gcgtggtggaaatacagtaaatatataaagggattaacggctgaagagcgccatattgaagcgacgccagccagc

SEQ ID NO: 883554 - DNA, 75 bp, synthetic construct
  source 1..75: mol_type = other DNA
ttgtaaaaaacaagaaagaagatatcacctggagttttgataaaactcagggcactggtgttattaatcttgaaa

SEQ ID NO: 883555 - DNA, 75 bp, synthetic construct
  source 1..75: mol_type = other DNA
ggttcgctccaagtaactaaggaacaaactgacgaaatattagaaagcgattcctttaaagctgaaattcgatct

SEQ ID NO: 883556 - DNA, 75 bp, synthetic construct
  source 1..75: mol_type = other DNA
aacaaaggttttatgaaacaatggagttcattaacaataacttcccgataggtttccgtaaaacagagaaggcta

SEQ ID NO: 883557 - DNA, 75 bp, synthetic construct
  source 1..75: mol_type = other DNA
tttttggagaaacacccagaatttaaaactagaacggatattaatactgagtgggctagcagtgacgagtttaat

SEQ ID NO: 883558 - DNA, 75 bp, synthetic construct
  source 1..75: mol_type = other DNA
aagcgaaccacgctggaaagaaccttgaccagatgttccaagacatctctgatcgggtaggacgctcaggacttt

SEQ ID NO: 883559 - DNA, 75 bp, synthetic construct
  source 1..75: mol_type = other DNA
aggacacaagggctatgttcttgtaggggttgctgaaaatgcgcatactgcaacaagagttcaggagattttcgg

SEQ ID NO: 883560 - DNA, 75 bp, synthetic construct
  source 1..75: mol_type = other DNA
gaggtgtcattcgcaccaagaataatcctgttggtgactatgctgaatggctggtttctaatgcactgggtatga

SEQ ID NO: 883561 - DNA, 75 bp, synthetic construct
  source 1..75: mol_type = other DNA
gtaaccgagaacttcgagattgctcaactaaggctttagtgagtttactcgagccaagaattcctgtattgagaa

SEQ ID NO: 883562 - DNA, 75 bp, synthetic construct
  source 1..75: mol_type = other DNA
agatttacaccaaaacactggtgtcggggcatcaggataccgccgatgtgacgtccggccaggatttcacctcca

SEQ ID NO: 883563 - DNA, 75 bp, synthetic construct
  source 1..75: mol_type = other DNA
cctgcatggtattgagccggatgagcaggatgtgacgctggcactgggtgaacgtgtggggcacaccattgtcta

SEQ ID NO: 883564 - DNA, 75 bp, synthetic construct
  source 1..75: mol_type = other DNA
ccggaagggttcgtggcgctttttgatgacgtgcgccagcgctgggagcttgcagaagatcaccggggaaaagtg

SEQ ID NO: 883565 - DNA, 75 bp, synthetic construct
  source 1..75: mol_type = other DNA
aaaacggctcaggtccagggcaacttcaacaatctgattatgttacgtgtcagggagaaccgtaccgccgaactc

SEQ ID NO: 883566 - DNA, 75 bp, synthetic construct
  source 1..75: mol_type = other DNA
atccgggatcaccgatatttccaatccgaggcaggggagtgattttacctccaatacccaggacagggtcagtat

SEQ ID NO: 883567 - DNA, 75 bp, synthetic construct
  source 1..75: mol_type = other DNA
aattgcagaggccatgcggcgtaattaccacaccggagagggatggtggaatgagactccctccgtgaacatgcg

SEQ ID NO: 883568 - DNA, 75 bp, synthetic construct
  source 1..75: mol_type = other DNA
gacggtcagcgccagatggtggcgaataacgaatatgttcacgaagcgattgtgctcaacagcgctaccgggctt

SEQ ID NO: 883569 - DNA, 75 bp, synthetic construct
  source 1..75: mol_type = other DNA
ccgtggtgttattaccgtggtttagcactatcggtgtggtcattgcctatacagcattgtatctattggcctttg

SEQ ID NO: 883570 - DNA, 75 bp, synthetic construct
  source 1..75: mol_type = other DNA
aaagcacaggaagaaataaaggcgagcaagaagctatttaagaattcattgtcatacgatctgttaagtgagttt

SEQ ID NO: 883571 - DNA, 75 bp, synthetic construct
  source 1..75: mol_type = other DNA
gaaattatcgctaatatcgaaaataatatacctatgcgtgatggcttttatgaagaggtaattcaggacgtggtg

SEQ ID NO: 883572 - DNA, 75 bp, synthetic construct
  source 1..75: mol_type = other DNA
tgggtggaatatttattgtcagcggtctaattctgttaatgaactataaccatccgtatacctttaaagcgcaaa

SEQ ID NO: 883573 - DNA, 75 bp, synthetic construct
  source 1..75: mol_type = other DNA
ctacgggtggaatgacaacggcgacctggtgcgcatcagcggtccgcgacagacgcgggaatacggctacagcgc

SEQ ID NO: 883574 - DNA, 75 bp, synthetic construct
  source 1..75: mol_type = other DNA
caccactctggtacgtgttcaccgtgaggcggaaggcgcgccctttaccggtgtaaaaccggcaggccatattcc

SEQ ID NO: 883575 - DNA, 75 bp, synthetic construct
  source 1..75: mol_type = other DNA
aaattactaaaacggtcactattgagtgtgaaaacctggggatactgaataccgatgatatcagtacgtcttttt

SEQ ID NO: 883576 - DNA, 75 bp, synthetic construct
  source 1..75: mol_type = other DNA
gtatggtgaaaaatcaggtagtgtaactttttcagctgctcctgcgagccttactggagctcgcccagccccggg

SEQ ID NO: 883577 - DNA, 75 bp, synthetic construct
  source 1..75: mol_type = other DNA
ttacttttttgtttgtatgcctttgcggtttatttgttttattagctggtggtgttaaatggggtacggtggggt

SEQ ID NO: 883578 - DNA, 75 bp, synthetic construct
  source 1..75: mol_type = other DNA
agcaacgagtattgttgctgacccttaaccgtcccgccgcacgtaatgcgctaaataatgcccttctgacgcaac

SEQ ID NO: 883579 - DNA, 75 bp, synthetic construct
  source 1..75: mol_type = other DNA
taaaccacttatcgcagccgtcaatggttacgcgcttggggcgggttgcgaactggcattgttgtgcgatgtggt

SEQ ID NO: 883580 - DNA, 75 bp, synthetic construct
  source 1..75: mol_type = other DNA
atgatgattttacaacccatggggagaaaaggccgtgcacccgctcatgtccgtgcgtggacacctgaagaagat

SEQ ID NO: 883581 - DNA, 75 bp, synthetic construct
  source 1..75: mol_type = other DNA
aaagccgccgtcgaagccgctattgcccgtgccaaagcgcgcaagctggaacagcaacagactaacgcagaacca

SEQ ID NO: 883582 - DNA, 75 bp, synthetic construct
  source 1..75: mol_type = other DNA
acaggttgatccgcgcaaagcggcagttgccgcggctattgcccgcgctcaggccaaaaaagccgcccagcagaa

SEQ ID NO: 883583 - DNA, 75 bp, synthetic construct
  source 1..75: mol_type = other DNA
gaaaataaggttggaacgacatttaacaccactgtaactaatggatcctcatatcctggacgctgtcattgtgat

SEQ ID NO: 883584 - DNA, 75 bp, synthetic construct
  source 1..75: mol_type = other DNA
aagcgatagtatatttttatatcaagaagacatttacaggaaaattgattattcctgaaacaaagatagtgacat

SEQ ID NO: 883585 - DNA, 75 bp, synthetic construct
  source 1..75: mol_type = other DNA
tgatggtgcttatattctttggcgattagacaaccatcttgttatacaaaacaatacagttctttacatttacct

SEQ ID NO: 883586 - DNA, 75 bp, synthetic construct
  source 1..75: mol_type = other DNA
caccattccaacccgcgcgacagcgaataaagagaatgagatgaacgcatcccccaacattaaatccggagcaca

SEQ ID NO: 883587 - DNA, 75 bp, synthetic construct
  source 1..75: mol_type = other DNA
aatacaaaaaggaacaggaaaagtatggcactggcagtgagattcagcgaggtatacaggccgcgacagccgcgc

SEQ ID NO: 883588 - DNA, 75 bp, synthetic construct
  source 1..75: mol_type = other DNA
gatgttaagacccgttttaccagcagtatcaataacggaacaaccactgcacatgcaggtagtgtcagtccggtg

SEQ ID NO: 883589 - DNA, 75 bp, synthetic construct
  source 1..75: mol_type = other DNA
ctgggaaataagcaatttggcatctacatgattaataactcaaggacagccaatggtaccgatggtcaggcgtac

SEQ ID NO: 883590 - DNA, 75 bp, synthetic construct
  source 1..75: mol_type = other DNA
cgtcaccgacagcctgaaccggcgtgaggtgctgcatacagaaggcggggccgggctgaagcgggtggtgaaaaa

SEQ ID NO: 883591 - DNA, 75 bp, synthetic construct
  source 1..75: mol_type = other DNA
gcctctacccggacgtagatccgtcgaaactgacagaagatcagaagcaaactgtaagtacgctggcaacgctgt

SEQ ID NO: 883592 - DNA, 75 bp, synthetic construct
  source 1..75: mol_type = other DNA
aaacagcaccgcatcagcagcagtgggagcacaaagcgggaagaatgctgttgagaataactacttgagcaataa

SEQ ID NO: 883593 - DNA, 75 bp, synthetic construct
  source 1..75: mol_type = other DNA
cctctgaacaccctgccgcagggcgccgcgctcagcgccaatggcaatacctatattctgggccagcgttatgtc

SEQ ID NO: 883594 - DNA, 75 bp, synthetic construct
  source 1..75: mol_type = other DNA
aactgctgcgaaacaggaactacaaccagtcgcagcatggcgtgacctgcaagaacggtgatacctggtatctgg

SEQ ID NO: 883595 - DNA, 75 bp, synthetic construct
  source 1..75: mol_type = other DNA
ttttacatttatcaccatgactccgcttttacaggtaaaccatcacgtccgaggaagactttaatcatgcaatcg

SEQ ID NO: 883596 - DNA, 75 bp, synthetic construct
  source 1..75: mol_type = other DNA
gggcttatccacgaagtctggcgacatacgctgaacaaaatcagccaggacaaacgaaacagtaattatattatc

SEQ ID NO: 883597 - DNA, 75 bp, synthetic construct
  source 1..75: mol_type = other DNA
tggtatcgatatcattcctgattatacctttaactttatgggaattgggggtagtggtaaaaatgacctggatta

SEQ ID NO: 883598 - DNA, 75 bp, synthetic construct
  source 1..75: mol_type = other DNA
tttgcctgcggcagcgtgctgctgcgtgaggcaatgctctcgcgtaatccgttgccagagccgataacggccgta

SEQ ID NO: 883599 - DNA, 75 bp, synthetic construct
  source 1..75: mol_type = other DNA
tcgtatatcctcctctgggatttgcaacatttcctctactgtttttacagcaggatgttcgtaactttgagactg

SEQ ID NO: 883600 - DNA, 75 bp, synthetic construct
  source 1..75: mol_type = other DNA
tagtgacagttaaggatattttttctttatcggcttcctcagtaaatcaagttgttatatataataacaaatgga

SEQ ID NO: 883601 - DNA, 75 bp, synthetic construct
  source 1..75: mol_type = other DNA
ttttaaaagacatattaaattatgatgaaaagaaaatagaatcattccaagctgaaataaataaaaatagagaaa

SEQ ID NO: 883602 - DNA, 75 bp, synthetic construct
  source 1..75: mol_type = other DNA
acgaatatctggtgttaagtaaagatgctgccaatttaaagaatgtaattattgattcatacatagtttcattac

SEQ ID NO: 883603 - DNA, 75 bp, synthetic construct
  source 1..75: mol_type = other DNA
gcttgataaagagaatggccttctgatctgccgaccagttcagaaggaaatcaacggcacgtggtacaccgtcga

SEQ ID NO: 883604 - DNA, 75 bp, synthetic construct
  source 1..75: mol_type = other DNA
cagggaaggaagagcaaaattgaagaactaatgaaagagtgctctcctcaacaacatgataatttgaaaatatac

SEQ ID NO: 883605 - DNA, 75 bp, synthetic construct
  source 1..75: mol_type = other DNA
caacatagtcacagcagccaaggatttcagagtttgtctggggcaatggtgctcagcctttatggaataataacc

SEQ ID NO: 883606 - DNA, 75 bp, synthetic construct
  source 1..75: mol_type = other DNA
atgctgccaatgtccaacgaattattcaagataatgcagcgctacataatacgttagatactataatggatagat

SEQ ID NO: 883607 - DNA, 75 bp, synthetic construct
  source 1..75: mol_type = other DNA
ctttgtccattatgtttgcaaatgccttatccgatttgcggttgttaatggcagggtatcttattgctcattttg

SEQ ID NO: 883608 - DNA, 75 bp, synthetic construct
  source 1..75: mol_type = other DNA
gctgtccagaattactgataacgaactactccatgcttgagtatatgctgatgcgacctatcgagcgtaatattt

SEQ ID NO: 883609 - DNA, 75 bp, synthetic construct
  source 1..75: mol_type = other DNA
catctccttttacaactttgtatgcgtgttaccaaaaaacttactgataatattaattcatccctgaaggtggat

SEQ ID NO: 883610 - DNA, 75 bp, synthetic construct
  source 1..75: mol_type = other DNA
tgaacgaggtgtccagctaaatcttattggtagttcaacgatcaacctgaatttcaaagcctgcaaatcgacaag

SEQ ID NO: 883611 - DNA, 75 bp, synthetic construct
  source 1..75: mol_type = other DNA
caaaaaaaagaaatccacgaactattaataatgatatttatgctgcattaaccttatctgatgacagcatacact

SEQ ID NO: 883612 - DNA, 75 bp, synthetic construct
  source 1..75: mol_type = other DNA
tgaatgatgtgccccggcaaccggacgacaatgacagtcccgccacatccggtgtgccctatatgacgcataacc

SEQ ID NO: 883613 - DNA, 75 bp, synthetic construct
  source 1..75: mol_type = other DNA
acaggtaacaatcaaacttttaatttaactcatgatcaaataaaatcagcctcaaatggtgaggaattaaccagg

SEQ ID NO: 883614 - DNA, 75 bp, synthetic construct
  source 1..75: mol_type = other DNA
aaagcattaagcaactttgaagagtgtgctgcgatggctgaacgtatcgaagagatgcagacaaaatctgcacca

SEQ ID NO: 883615 - DNA, 75 bp, synthetic construct
  source 1..75: mol_type = other DNA
tttcggccttttctctttccgagtgataatgaggattatccctaccaaattattagcattggcctatagtattga

SEQ ID NO: 883616 - DNA, 75 bp, synthetic construct
  source 1..75: mol_type = other DNA
ccttaccctcaggagtgcagggaaagctgaaatttcagaccgttaatgattatggttcagtaactccggtcagag

SEQ ID NO: 883617 - DNA, 75 bp, synthetic construct
  source 1..75: mol_type = other DNA
tggctggagaaactgctgcgcgagcaactgattgtgctcgatggagaacagatccggctcccggatacgggggaa

SEQ ID NO: 883618 - DNA, 75 bp, synthetic construct
  source 1..75: mol_type = other DNA
ggctaccgtgcttgcgcttcttgatgaactggaagctcaaagcaaacgcattgcagagctggagaaaaaagctgc

SEQ ID NO: 883619 - DNA, 75 bp, synthetic construct
  source 1..75: mol_type = other DNA
agcccagacaaatgaacaccaaaccctgagtgaattgttttataaagaactcgaggataaattttctggcaagga

SEQ ID NO: 883620 - DNA, 75 bp, synthetic construct
  source 1..75: mol_type = other DNA
tcaatctacagcttaatgaattaaacttcgaatccccaagaaatcaaattgttaaaggaattattaaacaactgg

SEQ ID NO: 883621 - DNA, 75 bp, synthetic construct
  source 1..75: mol_type = other DNA
acaatcttcgattgccatttatatatgtaaaaagcggtttcaggaacgctgaatatatcggcataagaaactggc

SEQ ID NO: 883622 - DNA, 75 bp, synthetic construct
  source 1..75: mol_type = other DNA
ctggtcagccagcagtttctctcccttgaatttgcgcaggtgctggacaaaatggcctacctgacgatatggcag

SEQ ID NO: 883623 - DNA, 75 bp, synthetic construct
  source 1..75: mol_type = other DNA
cgcaatatgagcctcgtaaaacctcactcaccgaacaggtagctcatcatctggagtttgtgagggccgccgcca

SEQ ID NO: 883624 - DNA, 75 bp, synthetic construct
  source 1..75: mol_type = other DNA
gatttacagccatgcacaacagagtacgaacgctaccgcctcatcagagcacaggcagacgggcaggaactgaag

SEQ ID NO: 883625 - DNA, 75 bp, synthetic construct
  source 1..75: mol_type = other DNA
cacaattgaacgctggcagatgcaagggcttccccatgtatctggtggcggaaaaggtgtggaggtgactttcga

SEQ ID NO: 883626 - DNA, 75 bp, synthetic construct
  source 1..75: mol_type = other DNA
cgtttgaactgccggatgggtgggagtggagctatttacaggatgtaaccaatctaattacagatggcaaacatg

SEQ ID NO: 883627 - DNA, 75 bp, synthetic construct
  source 1..75: mol_type = other DNA
ctcaagcatcaatatgatagctggtatggcaactaggaaagaaaaagagttgggcgaattttgggaaagaaccac

SEQ ID NO: 883628 - DNA, 75 bp, synthetic construct
  source 1..75: mol_type = other DNA
ttagaaactatggctaaggaaatcactcaaaacccgaatgtggcaaatgagtcattgggtggtttttttaaacag

SEQ ID NO: 883629 - DNA, 75 bp, synthetic construct
  source 1..75: mol_type = other DNA
ctctgcacaggtgatcgaatggtatgcacagagggagaaggacatcgaaaacgaaaaactccgcagggagcttga

SEQ ID NO: 883630 - DNA, 75 bp, synthetic construct
  source 1..75: mol_type = other DNA
ctttccctttacggggtaattgaagatttggcaagaaaagagggagacccatggaaaaagcagcaccataaatcg

SEQ ID NO: 883631 - DNA, 75 bp, synthetic construct
  source 1..75: mol_type = other DNA
tttggctgatttgaccgaagctatcacgaatttacgtacttaccgcgaccggcttcagggagaagccgaccagtt

SEQ ID NO: 883632 - DNA, 75 bp, synthetic construct
  source 1..75: mol_type = other DNA
gaatctctgcattatctcacccaagagagtgccgctacctatataccgagtgtggtggggctttttgaaaaactg

SEQ ID NO: 883633 - DNA, 75 bp, synthetic construct
  source 1..75: mol_type = other DNA
caaacgaaacagtaattatattatcgcagagctggttattccgccggaggtgggcggtttctggatgcgagagct

SEQ ID NO: 883634 - DNA, 75 bp, synthetic construct
  source 1..75: mol_type = other DNA
acgcagatcctccctggtcttacggcaacaccatcagcaatggcgccgctgccgaccactattccaccatgaagc

SEQ ID NO: 883635 - DNA, 75 bp, synthetic construct
  source 1..75: mol_type = other DNA
ggagatgattaatacgatgctgcacgatgcattctcagtgtttggaccggaggatgcaccgttgctgcacacggt

SEQ ID NO: 883636 - DNA, 75 bp, synthetic construct
  source 1..75: mol_type = other DNA
ccatcgatattgtggtgttcttcaaacacacacatatgacggagatctactacaacccaatagagaaaaatcaac

SEQ ID NO: 883637 - DNA, 75 bp, synthetic construct
  source 1..75: mol_type = other DNA
atgtatggtggctggctgcccatattgctccccgcactgactggcagcagtttgcatggcagagagcagaacact

SEQ ID NO: 883638 - DNA, 75 bp, synthetic construct
  source 1..75: mol_type = other DNA
gttgaacgaacaaaagctggactggaagcagctcgcgcacagggacgaattggtggacgtcgccccaaacttaca

SEQ ID NO: 883639 - DNA, 75 bp, synthetic construct
  source 1..75: mol_type = other DNA
aggagttgcgcgaacgaggcatcaactttcgtagtctgacggattcaattgataccagtaccccaatggggcgct

SEQ ID NO: 883640 - DNA, 75 bp, synthetic construct
  source 1..75: mol_type = other DNA
cgaccatctttcgtcgcgtgtggcggtatttacccttgaagaacatgaagtagcacgacatgagtcggcgcagtt

SEQ ID NO: 883641 - DNA, 75 bp, synthetic construct
  source 1..75: mol_type = other DNA
ccgccgcgaccatgaccgatattgtcagttcggtaacccgcgtgaacgacattatgggagaaattgcttcggcgt

SEQ ID NO: 883642 - DNA, 75 bp, synthetic construct
  source 1..75: mol_type = other DNA
ttcagtagtgaccattggtatggttgtgtggttgttctgctgccagggaagaggactgctgagcaggaagtcatt

SEQ ID NO: 883643 - DNA, 75 bp, synthetic construct
  source 1..75: mol_type = other DNA
cagccactggaaaaggtgctggttgatgcagaaaaagcgattacggattttatgatcgcgcgtggttatcactag

SEQ ID NO: 883644 - DNA, 75 bp, synthetic construct
  source 1..75: mol_type = other DNA
ggtgcgctcgacgttcatttaagtaatgaaggtcaggatgccacgacgttacgcgcatctgttattcggacgacc

SEQ ID NO: 883645 - DNA, 75 bp, synthetic construct
  source 1..75: mol_type = other DNA
tacagtgacctgcttgatctctctattgcaatcaacaaatacaacaacagcgcagaaccccttgataccctgcac

SEQ ID NO: 883646 - DNA, 75 bp, synthetic construct
  source 1..75: mol_type = other DNA
atgcagatttatcttcaccggacgcagacttgtctatgatgtcgcgtcatactatttttcaacacgttgaaatca

SEQ ID NO: 883647 - DNA, 75 bp, synthetic construct
  source 1..75: mol_type = other DNA
tgcccgtaatatcggagaggtcaaaactggtgtggaaggtcaaataaatccccatctgaacctgtgggggaatgt

SEQ ID NO: 883648 - DNA, 75 bp, synthetic construct
  source 1..75: mol_type = other DNA
catgcctcgccgtcttatctggcacgccacggtacgccggagagtattgacgcgttgttcacccatacgcttgtg

SEQ ID NO: 883649 - DNA, 75 bp, synthetic construct
  source 1..75: mol_type = other DNA
ctaatcctattagatatgagcatgtcaacatatgacatttctgacaaagatcccgttggtggtatacctgagagt

SEQ ID NO: 883650 - DNA, 75 bp, synthetic construct
  source 1..75: mol_type = other DNA
atgtcggttgcctgtgctgcaaacgttgaaagcagagcggccggtggtgacttggtagggcttgcacctgcgaaa

SEQ ID NO: 883651 - DNA, 75 bp, synthetic construct
  source 1..75: mol_type = other DNA
gcgtgcagcgtcgcgggtggtgatcttttagggctttccccggccagtactggccgcgtggtctattgcgccgga

SEQ ID NO: 883652 - DNA, 75 bp, synthetic construct
  source 1..75: mol_type = other DNA
ttgtgcggaaaactggttgcgctcacataacggcatagactatgcagcagcactccccggagagacactgagcgg

SEQ ID NO: 883653 - DNA, 75 bp, synthetic construct
  source 1..75: mol_type = other DNA
agacggtaacggtgacgcttaacgggcagacgtatcagggcgtcgtgcagtcagacggcacctggagcgtgaccg

SEQ ID NO: 883654 - DNA, 75 bp, synthetic construct
  source 1..75: mol_type = other DNA
attgatgtcaatgatgagcagttaaaactggcaaccgaaatgggtgcagatttagcgattaactcacgcaccgaa

SEQ ID NO: 883655 - DNA, 75 bp, synthetic construct
  source 1..75: mol_type = other DNA
gtttcaaaatctgcacgaaaaaggtgttaattttcggagtattacagatggcgtagacctgaaaacagcaagtgg

SEQ ID NO: 883656 - DNA, 75 bp, synthetic construct
  source 1..75: mol_type = other DNA
acgatcctgctactgggactgtcagttatgtattggccgatagagttggaggggttgcggctattattgatccgg

SEQ ID NO: 883657 - DNA, 75 bp, synthetic construct
  source 1..75: mol_type = other DNA
ttggctgtttctacaaagaaacgctgatcgcagcgcttcaccgctattgtaatcgtcatgccccaacactcgaca

SEQ ID NO: 883658 - DNA, 75 bp, synthetic construct
  source 1..75: mol_type = other DNA
gcggtatattacacaagaccccattgggctggaggggggatggaacctgtataattacccactgaatccgataat

SEQ ID NO: 883659 - DNA, 75 bp, synthetic construct
  source 1..75: mol_type = other DNA
aaagcattcgacaaagcaatgagcgccgaggcagatcgcatcgttgacatgctgcccgacttactcagtggaatt

SEQ ID NO: 883660 - DNA, 75 bp, synthetic construct
  source 1..75: mol_type = other DNA
cttggaattgggttgcatcttattgattttataagaaagagtaaagatcaaggattcagagagttttgttataac

SEQ ID NO: 883661 - DNA, 75 bp, synthetic construct
  source 1..75: mol_type = other DNA
tttttcactctgcgactcaatatgcttatttgatcaataaacttattgctgataatgactcgttaagagaacgaa

SEQ ID NO: 883662 - DNA, 75 bp, synthetic construct
  source 1..75: mol_type = other DNA
acatacaaacccaaaaatgcttcctgtttcaggatgctgatatgtcctgcctgttctcccaggagggaaaataca

SEQ ID NO: 883663 - DNA, 75 bp, synthetic construct
  source 1..75: mol_type = other DNA
gcgatgcaggcgcgtcgttcgattggttcccttgcaaaaccagcgacttatctgactgccttaagccagccgaaa

SEQ ID NO: 883664 - DNA, 75 bp, synthetic construct
  source 1..75: mol_type = other DNA
aaaaagcaagtttcaagaataatgtcaaggtaatatacaatactgttggtggagttcctgtttcttcacaaacta

SEQ ID NO: 883665 - DNA, 75 bp, synthetic construct
  source 1..75: mol_type = other DNA
atatgaagaaaaaccgtcatttaggaaagtcagatatagctctaaaagaggatttatttaagaggaccgtaggtc

SEQ ID NO: 883666 - DNA, 75 bp, synthetic construct
  source 1..75: mol_type = other DNA
actatatttcatcggttgaattctggaggcacaagacttaataaccaagaaattaggaattgtatttttagcggt

SEQ ID NO: 883667 - DNA, 75 bp, synthetic construct
  source 1..75: mol_type = other DNA
agaatgttattttgggacgcaatgcggtatccaccgatggtgcgcaggcattacttcgtcaggaccacgctgatc

SEQ ID NO: 883668 - DNA, 75 bp, synthetic construct
  source 1..75: mol_type = other DNA
atgaagtgtacaccccgatatttaggtattttaggtattttaggtattttaggtattttaggtattttaggtatt

SEQ ID NO: 883669 - DNA, 75 bp, synthetic construct
  source 1..75: mol_type = other DNA
cgtttttgttgatgatcatgctaatggaattaactttcagtgtattaacactgtaagcgatacggttgatggtta

SEQ ID NO: 883670 - DNA, 75 bp, synthetic construct
  source 1..75: mol_type = other DNA
aagatagtgacagggttgcatgttatacaatgttttggctagcaagccatagtgagatttctcttcctgttttaa

SEQ ID NO: 883671 - DNA, 75 bp, synthetic construct
  source 1..75: mol_type = other DNA
gcgcatatgatcgttataattatggtgataatttaatgccgatcttgttagaaagatttctaaagatgaattttc

SEQ ID NO: 883672 - DNA, 75 bp, synthetic construct
  source 1..75: mol_type = other DNA
ttccctgatgttccagataataatggtaatgtcgctgctcacgcccacatggttctttcaaatagcaaagaaatt

SEQ ID NO: 883673 - DNA, 75 bp, synthetic construct
  source 1..75: mol_type = other DNA
aaatgctgcattatcgccatgcaataatgcttcctaaaaaggatgctcttttaacatcaaacctgcaagataggt

SEQ ID NO: 883674 - DNA, 75 bp, synthetic construct
  source 1..75: mol_type = other DNA
ggttttacgctagtacaataaaaaacaaatgtatattaaagatagtatggtcttatggttcttgtgaattgacat

SEQ ID NO: 883675 - DNA, 75 bp, synthetic construct
  source 1..75: mol_type = other DNA
cagcgcgatccgtattcctttcaaggttcgcagctttgttgattttattgctaaagcgttaggagatacaccgct

SEQ ID NO: 883676 - DNA, 75 bp, synthetic construct
  source 1..75: mol_type = other DNA
tcacgactcgggctttaagttcgaatggcgtgatccaatcttcaacagcccacaggcattgcagtcgcaggctga

SEQ ID NO: 883677 - DNA, 75 bp, synthetic construct
  source 1..75: mol_type = other DNA
tttacctctggcacagcaacgtctcaggacatccgcgccggggcaatcgtgcttcgtgatcagatgcgtcgcgta

SEQ ID NO: 883678 - DNA, 75 bp, synthetic construct
  source 1..75: mol_type = other DNA
tgaaagttgcgtgcccaattttgtacgttttttatcttttttatgagcacgtatttttcaggaatgtctctttga

SEQ ID NO: 883679 - DNA, 75 bp, synthetic construct
  source 1..75: mol_type = other DNA
agtaggttctggttatactccgacttatacaaacaaaataacaattacaaaaaaaccatattttgaaagtgtgac

SEQ ID NO: 883680 - DNA, 75 bp, synthetic construct
  source 1..75: mol_type = other DNA
cattcagttgcttcttgaatccgtactggccggaacaggcattgcttacgggcccaactttgtttttggcgagca

SEQ ID NO: 883681 - DNA, 75 bp, synthetic construct
  source 1..75: mol_type = other DNA
ggtgaagcaaagccgcgtatcaaatcacgcaaggaaattacaaaagcactcgaagatgccagtggcgaatatgcc

SEQ ID NO: 883682 - DNA, 75 bp, synthetic construct
  source 1..75: mol_type = other DNA
cgggctcgatgaggacgacattgcagtgttgtttggctgcagcgttcagaccgttcgtgcaacgctctcccttct

SEQ ID NO: 883683 - DNA, 75 bp, synthetic construct
  source 1..75: mol_type = other DNA
cccgcaaagaaattactaaagccctggaatctgccgagggtgagtatgcaagcgcactccgttgggtgcttgggg

SEQ ID NO: 883684 - DNA, 75 bp, synthetic construct
  source 1..75: mol_type = other DNA
gccgaaggtaaaaaggatgctatcgagccacaggccgactacctcatggaaattgtcgaggggtgggcgcttccc

SEQ ID NO: 883685 - DNA, 75 bp, synthetic construct
  source 1..75: mol_type = other DNA
caactgagacgcgcaatcttgaggccaaccagtctcaattccgtgagctccagttcgcccgtaactccagtgccc

SEQ ID NO: 883686 - DNA, 75 bp, synthetic construct
  source 1..75: mol_type = other DNA
cacgcaaagaaatcacaaaagccctcgaaggtgccagcggtgaatacgcggcggctctgcgctgggtgcttgggg

SEQ ID NO: 883687 - DNA, 75 bp, synthetic construct
  source 1..75: mol_type = other DNA
cgttgaaccgactgaaaccatcaagcaggtcacggcgctggggcgtcgtttttttaagcctgaccgccgatctgc

SEQ ID NO: 883688 - DNA, 75 bp, synthetic construct
  source 1..75: mol_type = other DNA
ctatgccgtgattgaggtggacttagacggaggagataaggcattttactttgttgcgttcagggctttcaggga

SEQ ID NO: 883689 - DNA, 75 bp, synthetic construct
  source 1..75: mol_type = other DNA
tctgaaaaacagaaaggtaaatcagtgaaatttttcaccattgcctacaacttattgagaaataagcagcttcct

SEQ ID NO: 883690 - DNA, 75 bp, synthetic construct
  source 1..75: mol_type = other DNA
gaaagcaacgttattcatgccgggtatggtagctatgccgtgattgaggtggacttagacggaggagataaggca

SEQ ID NO: 883691 - DNA, 75 bp, synthetic construct
  source 1..75: mol_type = other DNA
tttagatgatgcagagcagctgtttgcacaccatcaaccgactccggtcaccagcgtgatttgctggggcagggc

SEQ ID NO: 883692 - DNA, 75 bp, synthetic construct
  source 1..75: mol_type = other DNA
tactggctgaagctggccgccgagcaaggtcattgtgaagcacaatattccttagggcaaaagtatactgaggat

SEQ ID NO: 883693 - DNA, 75 bp, synthetic construct
  source 1..75: mol_type = other DNA
acaccgccactgtttgttagtgaacccaaaagcgaaaaatactttgcgtattatttacaccggtccaccgctggc

SEQ ID NO: 883694 - DNA, 75 bp, synthetic construct
  source 1..75: mol_type = other DNA
actggtattgttataaaagctattgacagaaatagtttctcattatctgacttctttaacagaagaataaagaga

SEQ ID NO: 883695 - DNA, 75 bp, synthetic construct
  source 1..75: mol_type = other DNA
acaacttatttccagtaaactgtcagtgaatcaaatcgcaatacgttgcggttatgccagcacaccgtattttat

SEQ ID NO: 883696 - DNA, 75 bp, synthetic construct
  source 1..75: mol_type = other DNA
ttgccggtggcctgatgctgacaggctgtgccggcatgaaaagtgaatttgactgcaatgatacggccagcaatg

SEQ ID NO: 883697 - DNA, 66 bp, synthetic construct
  source 1..66: mol_type = other DNA
ccgtttcagcgtcccgctgaaatcgtcggcttacctcctttcgccatgcaagcagtctatcgctaa

SEQ ID NO: 883698 - DNA, 75 bp, synthetic construct
  source 1..75: mol_type = other DNA
aacacttcagcaatctgaaaccagttggctcgctgttcggtttatccccgctggcgcggggaacacagagcaaca

SEQ ID NO: 883699 - DNA, 75 bp, synthetic construct
  source 1..75: mol_type = other DNA
gttcatcctattaccaaaggattattcttcacttattagtagctatttgtacacatccatctacgctgctaactt

SEQ ID NO: 883700 - DNA, 75 bp, synthetic construct
  source 1..75: mol_type = other DNA
gggacgaaccgaagcagtgacgatacgatggtggcgacagacaatgctgatgtcgggatcaaaatttacaataaa

SEQ ID NO: 883701 - DNA, 75 bp, synthetic construct
  source 1..75: mol_type = other DNA
tttatggacgagggtaaaattgtcgaagactcgccgaaagacgctttcttcgatgatccgaaatcggaccgcgca

SEQ ID NO: 883702 - DNA, 75 bp, synthetic construct
  source 1..75: mol_type = other DNA
tttcagtggtcagattaagatccgctttacactccgtaatgactctgtcagttcacaggccttgcctggtgaaga

SEQ ID NO: 883703 - DNA, 75 bp, synthetic construct
  source 1..75: mol_type = other DNA
ttgaagaaaattgcgcatacgcattgatcaacgagcacgtacttgatttgttagatttgctgagtcgccaacccg

SEQ ID NO: 883704 - DNA, 75 bp, synthetic construct
  source 1..75: mol_type = other DNA
aaactatcgtatcttctcgttactggaaaacgccgaagaagaaaaagaacggcaaatagcctcaatactttcatg

SEQ ID NO: 883705 - DNA, 75 bp, synthetic construct
  source 1..75: mol_type = other DNA
atcccggccccggcggatgtgccggcacgacctgtggagggcgatgttccgcccccgcagtcaggaaactcacat

SEQ ID NO: 883706 - DNA, 75 bp, synthetic construct
  source 1..75: mol_type = other DNA
atttctggacggcgttccccccaaagaagcccgccccctgcgcgtgaagggggatgtaccggccacacaggcctg

SEQ ID NO: 883707 - DNA, 75 bp, synthetic construct
  source 1..75: mol_type = other DNA
gctgaatgaacgtttagataatcaagcgtcagttgttgcgaacgtgggggcgattgttgcctctggttcttcacg

SEQ ID NO: 883708 - DNA, 75 bp, synthetic construct
  source 1..75: mol_type = other DNA
tcactgctgacgatgagaagggcgaagtaatcgcagccgttcctgatgagcgtggttatatgacgacagagaacg

SEQ ID NO: 883709 - DNA, 75 bp, synthetic construct
  source 1..75: mol_type = other DNA
agtgattttggcaactctggcagcgattaccgtaccagccggtcagagccttttgatgccgggcacagctacttc

SEQ ID NO: 883710 - DNA, 75 bp, synthetic construct
  source 1..75: mol_type = other DNA
tgcgttgttttcgaaactggatagccgggatgagttcgataccctacccctgtttaaagttaaaaatattgcgcc

SEQ ID NO: 883711 - DNA, 75 bp, synthetic construct
  source 1..75: mol_type = other DNA
ttagctaccagacagataagttcatccgtgaaaacattcatgtaaatcaatcttacatggcactgaaatggaacg

SEQ ID NO: 883712 - DNA, 75 bp, synthetic construct
  source 1..75: mol_type = other DNA
agaggctgaaaccaatggcctacgttctcattatagtttcactggcgacggtagccgttccagccggtcagagcc

SEQ ID NO: 883713 - DNA, 75 bp, synthetic construct
  source 1..75: mol_type = other DNA
atggagatgtactttaaaagaatgaaagatgagtggaccggattagttgcccaggccgctcccatcattcgcaca

SEQ ID NO: 883714 - DNA, 75 bp, synthetic construct
  source 1..75: mol_type = other DNA
gcgttggtcttacatcgtcatcagtcggtgtaacctttgccacgctgtttccggaggcgactccagcagtgatgc

SEQ ID NO: 883715 - DNA, 75 bp, synthetic construct
  source 1..75: mol_type = other DNA
gatgttttttattattatggcgcgaaaagaaacccggcaacaatttgcggcaattccttctctgattaaaaaccg

SEQ ID NO: 883716 - DNA, 75 bp, synthetic construct
  source 1..75: mol_type = other DNA
aaaggtgaggtgctcgaccgcaaagccacaagcgagcgcggcgcgccggtgtttaaaacctgcgagcgctgcagc

SEQ ID NO: 883717 - DNA, 75 bp, synthetic construct
  source 1..75: mol_type = other DNA
aactggatgaaaccgtagtcactgtcatcccaactcacggtgctattgccagagcaacatttaatgcacaaatcg

SEQ ID NO: 883718 - DNA, 75 bp, synthetic construct
  source 1..75: mol_type = other DNA
tgcacccggatcaactcagccagcccgcgccagtgacggagcttgccagtctgcaccccaatcacgtctgggaaa

SEQ ID NO: 883719 - DNA, 75 bp, synthetic construct
  source 1..75: mol_type = other DNA
aacattgccgcagccaactcgctgtttagccatcgcttacacgaccgtctgggtgagccgcaatatacagattca

SEQ ID NO: 883720 - DNA, 75 bp, synthetic construct
  source 1..75: mol_type = other DNA
gatgaatttatcattgttttgactgaagcttctgaaaacgaaacgttacgtaccgctgaagcggcgcacgaaaaa

SEQ ID NO: 883721 - DNA, 75 bp, synthetic construct
  source 1..75: mol_type = other DNA
atggaacgctggattattaacgtgctttctgcccaggttgacgatgtcgaaaggctaatacaaatccagcatacc

SEQ ID NO: 883722 - DNA, 75 bp, synthetic construct
  source 1..75: mol_type = other DNA
caccgtcgctgaagtacatgctcgtattggcattccggtcgaaattgtcgaaatgggctttcgggtattaaaaaa

SEQ ID NO: 883723 - DNA, 75 bp, synthetic construct
  source 1..75: mol_type = other DNA
acctaatcaccttgagaaaataaataatttagttgaaagatatcctgattgttccatgtattcatcgtgttttta

SEQ ID NO: 883724 - DNA, 75 bp, synthetic construct
  source 1..75: mol_type = other DNA
gtgctctctgcgcaagcggacgatgttgataggcttatacaaatccaacataccgtggccgaagtacatgcccgt

SEQ ID NO: 883725 - DNA, 75 bp, synthetic construct
  source 1..75: mol_type = other DNA
atggagatgtactttaaaagaatgaaagatgagtggactggattagttacccaggcttcccctctcattcgcgct

SEQ ID NO: 883726 - DNA, 75 bp, synthetic construct
  source 1..75: mol_type = other DNA
agcgcgttgactttactatagaacaaatcaataaagttaggtcaaataaggaaaaactcactgactaccttgctg

SEQ ID NO: 883727 - DNA, 75 bp, synthetic construct
  source 1..75: mol_type = other DNA
tggcgggcgcggtgacgggggtgacggacggcgcgggccgctgttttcacctggtgctgaccacacaggcgcagc

SEQ ID NO: 883728 - DNA, 75 bp, synthetic construct
  source 1..75: mol_type = other DNA
aacgttatcattatgacctgaccggaaaactcacgcagagtgaagatgaggggcttgtcaccctctggtactacg

SEQ ID NO: 883729 - DNA, 75 bp, synthetic construct
  source 1..75: mol_type = other DNA
gacgaaattttactataacgacgggaaccagctgacggcggtggtgtccccggacgggctggagagccgccgggc

SEQ ID NO: 883730 - DNA, 75 bp, synthetic construct
  source 1..75: mol_type = other DNA
ttacatttaattttattttattatatatattatcaataacaatatataaacatttggatgtttttaaatattcga

SEQ ID NO: 883731 - DNA, 75 bp, synthetic construct
  source 1..75: mol_type = other DNA
acgacccgctgggacggcgaatggcgaaacgggtatggcggcgggagcgtgacctgacggggtggatgtcgctgt

SEQ ID NO: 883732 - DNA, 75 bp, synthetic construct
  source 1..75: mol_type = other DNA
taagctacagccgcagcgagtcgttctggctggcgcggggcggggtggcggagcagcacagttcgcagccgctaa

SEQ ID NO: 883733 - DNA, 75 bp, synthetic construct
  source 1..75: mol_type = other DNA
ctaccactacgacagccagcaccgtctggtgttctacacgcggatacagcacggtgagccaccggtggagagccg

SEQ ID NO: 883734 - DNA, 75 bp, synthetic construct
  source 1..75: mol_type = other DNA
aggagctcatagtggactgcctttttatcgggtggatggaccgttgcagacgatgaaaataacgggtacgccaga

SEQ ID NO: 883735 - DNA, 75 bp, synthetic construct
  source 1..75: mol_type = other DNA
acagcgaacaggggctggcgacccgtcaggagccggacggtctgccgccggtggagtggctgacgtatggcagcg

SEQ ID NO: 883736 - DNA, 75 bp, synthetic construct
  source 1..75: mol_type = other DNA
ctaccactacgacagccagcaccgtctggtgttctacacgcggatacagcacggtgagcctctggtagagagccg

SEQ ID NO: 883737 - DNA, 75 bp, synthetic construct
  source 1..75: mol_type = other DNA
ctaccactacgacagccagcaccgtctggtgttctacacgcggatacagcacggtgagcctcaggttgagagccg

SEQ ID NO: 883738 - DNA, 75 bp, synthetic construct
  source 1..75: mol_type = other DNA
ctaccactacgacagccagcaccgtctggtgttctacacgcggatacagcacggtgagccacgggtcgagagccg

SEQ ID NO: 883739 - DNA, 75 bp, synthetic construct
  source 1..75: mol_type = other DNA
tataacattatctaacttctttatttttctattttcattattaatagtgttttacaaagagaggatttatgggaa

SEQ ID NO: 883740 - DNA, 75 bp, synthetic construct
  source 1..75: mol_type = other DNA
acattacagcagaagactctgtcatcagacaggtttatggctgggtatttgataatgtaatggtgaatgaagttg

SEQ ID NO: 883741 - DNA, 75 bp, synthetic construct
  source 1..75: mol_type = other DNA
aatgcaactcttctcgccatgtgtctagctttatctgtggcagaccagtgtatagcgggtacaacaaccctatca

SEQ ID NO: 883742 - DNA, 75 bp, synthetic construct
  source 1..75: mol_type = other DNA
attgctcaaaaaacactggagaaattattcgaaattgaatctaaaaccgtagacgaaaccacggctaatctcttt

SEQ ID NO: 883743 - DNA, 75 bp, synthetic construct
  source 1..75: mol_type = other DNA
tgtatttttggaacttggtttttatattcgcaatgtcaccgttaatgagattaaggcgtgggctaaacgttatgg

SEQ ID NO: 883744 - DNA, 75 bp, synthetic construct
  source 1..75: mol_type = other DNA
atatcgccagtacctgatcgatcatgcaaaagagtttggtctgaatcctgacgacatttcacaaatgtctatgcc

SEQ ID NO: 883745 - DNA, 75 bp, synthetic construct
  source 1..75: mol_type = other DNA
catctgagatggtatatccaggttgttgatgcggccgatttgttctatctgctgttgtggctgaatggtatggag

SEQ ID NO: 883746 - DNA, 75 bp, synthetic construct
  source 1..75: mol_type = other DNA
gccagcacctgaacctcccgcagcttgaccgtgagtatacgtggaacgacaacgggcaactggtgcgcatcagcg

SEQ ID NO: 883747 - DNA, 75 bp, synthetic construct
  source 1..75: mol_type = other DNA
aatgaccatgggttgacatgtccatcaacaacagattgctcagatagatgtagtgattatattaatccagagcat

SEQ ID NO: 883748 - DNA, 75 bp, synthetic construct
  source 1..75: mol_type = other DNA
agggagcgaagacggtcacggtgtggtgttcccggctgaactggtggggctgctggacaggctggagggggaaat

SEQ ID NO: 883749 - DNA, 75 bp, synthetic construct
  source 1..75: mol_type = other DNA
tacgatagccgcgctgtataccgcattgcgttttatcggtggggcacgggcgcaggatggctccggcacttcggc

SEQ ID NO: 883750 - DNA, 75 bp, synthetic construct
  source 1..75: mol_type = other DNA
ggcacagcagacttacagactcctgcgccctgaacgttttgtcagtaatcctcccggctggcgacagtatctgtt

SEQ ID NO: 883751 - DNA, 75 bp, synthetic construct
  source 1..75: mol_type = other DNA
gcctgaagcgtgtggtgaagaaggagcatgctgacggtagcatcacccgcagcgagtatgatgaggcggggaggc

SEQ ID NO: 883752 - DNA, 75 bp, synthetic construct
  source 1..75: mol_type = other DNA
taaatcatcagagtgactattgtagattcaatctgtcaatgcaacacccctttcaattatctctttcggtgtttt

SEQ ID NO: 883753 - DNA, 75 bp, synthetic construct
  source 1..75: mol_type = other DNA
gtcttcctggcggcagaaaaaatccggtggcacctggggtgcaatcattcgtcaaccgctgggcatcgccagcat

SEQ ID NO: 883754 - DNA, 75 bp, synthetic construct
  source 1..75: mol_type = other DNA
ggtattcgtcacattctgggtaagcgtacagcgagggccgtattgacggggatgtgttattcagctggcagtgct

SEQ ID NO: 883755 - DNA, 75 bp, synthetic construct
  source 1..75: mol_type = other DNA
tcagtgatgctggctttaaagtgccatggtataaatccgttgagaagctgggttctgagagatcccctcataatt

SEQ ID NO: 883756 - DNA, 75 bp, synthetic construct
  source 1..75: mol_type = other DNA
gataaagaacaggtggttaagagtacatcgttactaaaagtgacaagagaaaatgatgtcattattaacttagcg

SEQ ID NO: 883757 - DNA, 75 bp, synthetic construct
  source 1..75: mol_type = other DNA
cgacaccttaaaactggaatccgccagttttgtcgatgaaaaattgcgggcgctacactctgatattctgtggtc

SEQ ID NO: 883758 - DNA, 75 bp, synthetic construct
  source 1..75: mol_type = other DNA
ggcagtcaaactcagatattgtttgggctgacggtgttacgcaaacagcttccggaatgtcactccgcactggat

SEQ ID NO: 883759 - DNA, 75 bp, synthetic construct
  source 1..75: mol_type = other DNA
gtgtttcaaatttcgattttatcgccggacgcagtaagatatatggtgtaaagaatcaggaggactttctcgagg

SEQ ID NO: 883760 - DNA, 75 bp, synthetic construct
  source 1..75: mol_type = other DNA
ttcatggtggacaatatcagtgggatatcagtgaacaccgactaaatttaacagtaccacaggcgtatatcaatg

SEQ ID NO: 883761 - DNA, 75 bp, synthetic construct
  source 1..75: mol_type = other DNA
gagttgtaaataagattactgacgaaatacaaaacaatatatctgagttagaaaaaaggagagataaacaaaaaa

SEQ ID NO: 883762 - DNA, 75 bp, synthetic construct
  source 1..75: mol_type = other DNA
attatccgtgacgatgatgtttatcgctcactgtcaaaagagaaatacacccgttaccgtcaggagcaacaacag

SEQ ID NO: 883763 - DNA, 75 bp, synthetic construct
  source 1..75: mol_type = other DNA
gatggttttccagaaacagggtttgatggtgcaaaattcacgctgttactaacccataatatgagaaatacggat

SEQ ID NO: 883764 - DNA, 75 bp, synthetic construct
  source 1..75: mol_type = other DNA
gggaagctgggttgaatcaggtggcgtgtataccacaacccgaatggtgactattgccggtaacgatcagcacgc

SEQ ID NO: 883765 - DNA, 75 bp, synthetic construct
  source 1..75: mol_type = other DNA
cggtcaccgccagcatcaacaacagcagccagagccggaacgtcacgtttatcgccgatgtcagcacggcgaaga

SEQ ID NO: 883766 - DNA, 75 bp, synthetic construct
  source 1..75: mol_type = other DNA
gcgtgacgacggacaacggcgcaacgactgccccgacggtcatcacagagctggacgggacggtggagatctctg

SEQ ID NO: 883767 - DNA, 75 bp, synthetic construct
  source 1..75: mol_type = other DNA
gaaaatctggttgccagtctgaaattgaaaacatgggcaacggagattaagtcctcgttatacggaatacaacca

SEQ ID NO: 883768 - DNA, 75 bp, synthetic construct
  source 1..75: mol_type = other DNA
tgctttagggctgacatcagaagtcatcgagtcttatatcgataatttcgcggtaggcggcgcaactcccgattc

SEQ ID NO: 883769 - DNA, 75 bp, synthetic construct
  source 1..75: mol_type = other DNA
aatgactatgaagcacgtccggcgaacggttgggatcttcgcgctgaaggctggttaccggcctggccgcagctg

SEQ ID NO: 883770 - DNA, 75 bp, synthetic construct
  source 1..75: mol_type = other DNA
aactctgcggcctttttcgttcttactgcgggtaaggcacccagtcgccgccgttcaggcgaacgtacggtttat

SEQ ID NO: 883771 - DNA, 75 bp, synthetic construct
  source 1..75: mol_type = other DNA
agttatattattgtttttttgtgggtttttattgtcaatggataaagatatattaactttaaaacatgaagatat

SEQ ID NO: 883772 - DNA, 75 bp, synthetic construct
  source 1..75: mol_type = other DNA
gtgccacgactgctccgacggtcaccacgcagccggacggcacggtggagatctctgtcaccagccggacggcgg

SEQ ID NO: 883773 - DNA, 75 bp, synthetic construct
  source 1..75: mol_type = other DNA
tgcgttcgataatctggtaaccggtgcagcttcacagttagccgctaatagtgtgctgacggtggatggcaccga

SEQ ID NO: 883774 - DNA, 75 bp, synthetic construct
  source 1..75: mol_type = other DNA
tggtaaagacgagcgacaaaacgatcctcacgcgattaccgcaggtttgagttacacccccgttcctctgatctc

SEQ ID NO: 883775 - DNA, 75 bp, synthetic construct
  source 1..75: mol_type = other DNA
tacagcaggtgttacccgctcactggtggcaggaaaacaatgttcatctgcattccggtgtaaccatcaaaacgc

SEQ ID NO: 883776 - DNA, 75 bp, synthetic construct
  source 1..75: mol_type = other DNA
aaatatttagtgcttttcctgacgctgagcagcaggaaatcataaaagagctaagaaacaaaaaagaggcaatgg

SEQ ID NO: 883777 - DNA, 75 bp, synthetic construct
  source 1..75: mol_type = other DNA
agctagacgtattgaacaaacatatgggatgcctgggggatatcttgatattgaaccagaagacataacagagtc

SEQ ID NO: 883778 - DNA, 75 bp, synthetic construct
  source 1..75: mol_type = other DNA
cgccactgattgaagctttttatcaacatcatagcgtgacgcgcctgaagtttatcaatggcgtactcggtggtt

SEQ ID NO: 883779 - DNA, 75 bp, synthetic construct
  source 1..75: mol_type = other DNA
tatgtttacagcgtttgggatgattttttcatctgcaatttttttcatttacaagtggagtgtgctagggaaaaa

SEQ ID NO: 883780 - DNA, 75 bp, synthetic construct
  source 1..75: mol_type = other DNA
tctttattgttatgggggggtgttctgcaacgcaaaatatggacaaggggctccgggctttgtctggaaaaaaga

SEQ ID NO: 883781 - DNA, 75 bp, synthetic construct
  source 1..75: mol_type = other DNA
acgattaatatcaatttgcacggtaacgttgttgatttctcctgtaccgtaaacacagcggatgttgataagacg

SEQ ID NO: 883782 - DNA, 75 bp, synthetic construct
  source 1..75: mol_type = other DNA
gctcataccagcccggtgacgtggaatttctgctaaagccggttgtcattgagatgacgccggttgagaaaaaag

SEQ ID NO: 883783 - DNA, 75 bp, synthetic construct
  source 1..75: mol_type = other DNA
atttttccccattactggtgatccagcggcagataactcagctagctttaatgctgctgcagcagttgctttatc

SEQ ID NO: 883784 - DNA, 75 bp, synthetic construct
  source 1..75: mol_type = other DNA
atatcacctggaattatgataaatgctcactggagtggcagtccgccatccagcaggcaatcaatttgactggct

SEQ ID NO: 883785 - DNA, 75 bp, synthetic construct
  source 1..75: mol_type = other DNA
cagtcgtcgggtgcactgccatccccgccgggtgtttatgtttcagtagttttaaaggagtcccgtaatgaaggc

SEQ ID NO: 883786 - DNA, 75 bp, synthetic construct
  source 1..75: mol_type = other DNA
actcaatgccctcattaacagctttaacgcagcgctttcccccgacagttttatcagtgatttttatggtcttat

SEQ ID NO: 883787 - DNA, 75 bp, synthetic construct
  source 1..75: mol_type = other DNA
acgcgttatcggccatgaatatttccataactggaccggtaaccgagtcacctgccgcgactggttccagctcag

SEQ ID NO: 883788 - DNA, 75 bp, synthetic construct
  source 1..75: mol_type = other DNA
cgcaactgagtgtattgcagattgtgcaaacgctcctgcaaggccaggataaaagcacgatcaccgctggcattc

SEQ ID NO: 883789 - DNA, 75 bp, synthetic construct
  source 1..75: mol_type = other DNA
ttatcgaagtcgaggaacaattgctaaagaattcaactttcttgtgcgcattgctttagtattacgttggagtct

SEQ ID NO: 883790 - DNA, 75 bp, synthetic construct
  source 1..75: mol_type = other DNA
cgatttagtcatgggagaaaaaaaatcctccctattgaacaatttcaaaaggttgaagggcttaatattcgattt

SEQ ID NO: 883791 - DNA, 75 bp, synthetic construct
  source 1..75: mol_type = other DNA
tactgcatatggcgttataaatattgggattaataatttttggcatccagagcagtgggttggcaagggattata

SEQ ID NO: 883792 - DNA, 75 bp, synthetic construct
  source 1..75: mol_type = other DNA
gtcttgataatggtgcactacaccgctgcgaaagctgggaaaacgccaataaccaggcgcaaattgccgctgccg

SEQ ID NO: 883793 - DNA, 75 bp, synthetic construct
  source 1..75: mol_type = other DNA
tacagcaggtgttacctcctcactggtggcaggaaaacaatgttcatctgcattccggtgtaaccatcaaatcgc

SEQ ID NO: 883794 - DNA, 75 bp, synthetic construct
  source 1..75: mol_type = other DNA
ggctgcggcctcgctacgccagcaagggttcaccggtgagctgcatctgttttccgatgagcgacatcttcctta

SEQ ID NO: 883795 - DNA, 75 bp, synthetic construct
  source 1..75: mol_type = other DNA
gtgcagcttaattatgtgagtgtggacggtaagcgtcatcagggaaaaggggtttcatggtttatctctcctgaa

SEQ ID NO: 883796 - DNA, 75 bp, synthetic construct
  source 1..75: mol_type = other DNA
aatatggtcgccagcggcggaaccccgcgtgatttcgggctaaaagtgaaatcacaccccgtgttaatggtgaca

SEQ ID NO: 883797 - DNA, 75 bp, synthetic construct
  source 1..75: mol_type = other DNA
tgtgacccgcttcaataaagtgcaatcggtcgtttatgagcatattgacgcctacattcaggaagtgagacagcg

SEQ ID NO: 883798 - DNA, 75 bp, synthetic construct
  source 1..75: mol_type = other DNA
tacttatttgagagtttttttcttcgttttaaagtaaaatcttgcagagaaggctttattttaagaaattcagta

SEQ ID NO: 883799 - DNA, 75 bp, synthetic construct
  source 1..75: mol_type = other DNA
ccctgcagcacttgccggtaaatctcagcagccggagactctgcagtggcgtgctgataaaggggggaaaataac

SEQ ID NO: 883800 - DNA, 75 bp, synthetic construct
  source 1..75: mol_type = other DNA
ttcttgcagggatgttgctctgttcatatgcaagtgcagcctcttttggcccccgcgaaagcacgctcatcttcg

SEQ ID NO: 883801 - DNA, 75 bp, synthetic construct
  source 1..75: mol_type = other DNA
ttgcctcccatagtagcattagacgtttacaattctcttccccccgatgatgaaatgcatttctattaccatatt

SEQ ID NO: 883802 - DNA, 75 bp, synthetic construct
  source 1..75: mol_type = other DNA
gtaggaaaggcgttgaatgaaagtcgaagtaatgatgagcatgaaaaatttcaatataatattcctcgcctcatt

SEQ ID NO: 883803 - DNA, 75 bp, synthetic construct
  source 1..75: mol_type = other DNA
ctgctgaccattctttaccaccacgtaccgtcggtcacatcgatgccggtctacctggggcaactggatgcgttg

SEQ ID NO: 883804 - DNA, 75 bp, synthetic construct
  source 1..75: mol_type = other DNA
gatcttccggataataacaagtgtgatgatataaattattttgttgaagagatgaatcgattgatatcaaatgga

SEQ ID NO: 883805 - DNA, 75 bp, synthetic construct
  source 1..75: mol_type = other DNA
atggataataaaatctttttaaatcataaggggaagaagtcgtataaagaaaggaatttatttcttttctcaaaa

SEQ ID NO: 883806 - DNA, 75 bp, synthetic construct
  source 1..75: mol_type = other DNA
tttataatgtggctgtccggcccgtttcggtaactatagaggaaaaaccgtatcgttatgtacacgaattaaaat

SEQ ID NO: 883807 - DNA, 75 bp, synthetic construct
  source 1..75: mol_type = other DNA
ccctgggacgtgtgggggttcagacagcttccgtaattgcagtcctggggggctgcaggtcttgctgttggactt

SEQ ID NO: 883808 - DNA, 75 bp, synthetic construct
  source 1..75: mol_type = other DNA
atttatctaaaaatccaataattcgactcctttttcgcttggtgtttttagctgtatttaaattgcagttgagat

SEQ ID NO: 883809 - DNA, 75 bp, synthetic construct
  source 1..75: mol_type = other DNA
aggcaagggaaaaaatcgctaaaattggacgaaaagtttgtgggacatgtgttagccatttatatacctcttact

SEQ ID NO: 883810 - DNA, 75 bp, synthetic construct
  source 1..75: mol_type = other DNA
tgccagcagcagatcgccatcatcgatgcgcggtgtgaattcctctatcaacaatcacacttctttgagaatagc

SEQ ID NO: 883811 - DNA, 75 bp, synthetic construct
  source 1..75: mol_type = other DNA
tttctgatttcggtgataaattaagcatggagaagaaaataatacttgaaagttatataaattcttttaatgggg

SEQ ID NO: 883812 - DNA, 75 bp, synthetic construct
  source 1..75: mol_type = other DNA
atctttcgcctataaatgtgtcaatgtttgattatcaaatgataaataaatctccgaatctagcagaattattgg

SEQ ID NO: 883813 - DNA, 75 bp, synthetic construct
  source 1..75: mol_type = other DNA
tcaatggtaggagcgctaaatacattaatatcaactgctgttgttttttatttgtcgggagtaggagcaattaat

SEQ ID NO: 883814 - DNA, 75 bp, synthetic construct
  source 1..75: mol_type = other DNA
gcccgggccgacaaggagcgggatgaggcgctggcgaacgtggccgcgctggaaagcgagctggcggtgctgcgc

SEQ ID NO: 883815 - DNA, 75 bp, synthetic construct
  source 1..75: mol_type = other DNA
gacacagcgtgagctggtcgcgaggctgaatcagcacatcccggagaagttttttaagatggtgaggtacttcgg

SEQ ID NO: 883816 - DNA, 75 bp, synthetic construct
  source 1..75: mol_type = other DNA
tacctgggtcgttatctgaagaagccgccgatagcggcctcccggctggcacattacaacggaggggcgagcctg

SEQ ID NO: 883817 - DNA, 75 bp, synthetic construct
  source 1..75: mol_type = other DNA
taactcctcctttcaaattacctgaaaattggatttgtactaacctaatagaaatttgtgaatatttagttgact

SEQ ID NO: 883818 - DNA, 75 bp, synthetic construct
  source 1..75: mol_type = other DNA
aaagtgaaaatattacttagtctctgtgataaagctcagaaaaaaataaaatccgccaaacaaacccaactgcac

SEQ ID NO: 883819 - DNA, 75 bp, synthetic construct
  source 1..75: mol_type = other DNA
ggacacgaaggcggagctgaaggaagcccgggaggacggccgccagcttcagaccgaactgctggctctggcccg

SEQ ID NO: 883820 - DNA, 75 bp, synthetic construct
  source 1..75: mol_type = other DNA
atgattcaaagggatattgaatactcgggacaattttcaaaggatgtaaaagttgcacaaaagcgtcataaggat

SEQ ID NO: 883821 - DNA, 75 bp, synthetic construct
  source 1..75: mol_type = other DNA
tgattttaggcatgcacgactttgtggggcagattttaccgacaccgatttaagaggtgctaatttttcatcgac

SEQ ID NO: 883822 - DNA, 75 bp, synthetic construct
  source 1..75: mol_type = other DNA
ggcgttcgttatgcgacaaaatcgtcgccatgattttgcccctacctccttctggcaactggcgcacagtagcgc

SEQ ID NO: 883823 - DNA, 75 bp, synthetic construct
  source 1..75: mol_type = other DNA
ccgaatggctggagctggaaggcgcgaaagatcttgatgacgcactctctctgctgaccattctttaccaccacg

SEQ ID NO: 883824 - DNA, 75 bp, synthetic construct
  source 1..75: mol_type = other DNA
gcattatcagtcacaatgcaagggattgttcctcagcttgaaacagcagctaaaacggatgctggagacaatcgt

SEQ ID NO: 883825 - DNA, 75 bp, synthetic construct
  source 1..75: mol_type = other DNA
ggcaggctggagagcgtgcgtaccctcgcaccggacctggacatccgcatcccgtatgccacggacccggcgggc

SEQ ID NO: 883826 - DNA, 75 bp, synthetic construct
  source 1..75: mol_type = other DNA
tatttactgatataatgcgatttattgatgataataatataaaaaacgtaaaatgtgttggtgccttgaagcata

SEQ ID NO: 883827 - DNA, 75 bp, synthetic construct
  source 1..75: mol_type = other DNA
atggcgcgtctgggggaaaacccggaaattcctccgtttatgatgtattcggaagtgctacaggaatcggtggtg

SEQ ID NO: 883828 - DNA, 75 bp, synthetic construct
  source 1..75: mol_type = other DNA
ccgtgaaatatggctggcaaaaacgcgccatgttacacgcacagtcggggatcagttccgatatcggcaccacgc

SEQ ID NO: 883829 - DNA, 75 bp, synthetic construct
  source 1..75: mol_type = other DNA
cctgaataacgaactacaggacaaattcgccagttggtatcccggttgtacgatagacgctcagagtagagggac

SEQ ID NO: 883830 - DNA, 75 bp, synthetic construct
  source 1..75: mol_type = other DNA
accacgcgacgctgaagttgtctgaatggggcagcagtaaacaatcagagagttattccatccacagcggtgctc

SEQ ID NO: 883831 - DNA, 75 bp, synthetic construct
  source 1..75: mol_type = other DNA
cggcgaagatcgctgatttggtggtcattaaggacgactcagtggcagacggcgcaatggcgaatatgctgcggg

SEQ ID NO: 883832 - DNA, 75 bp, synthetic construct
  source 1..75: mol_type = other DNA
gaatcagtgcggtcactgcaactatcaacaacagcaccgcgagccagaacgtgatgtttatcgctgatgtcagga

SEQ ID NO: 883833 - DNA, 75 bp, synthetic construct
  source 1..75: mol_type = other DNA
aaccataaaggtcgacattattttagcggcattgccgaagtgggccatatctcccgtctgattcaggatttcgac

SEQ ID NO: 883834 - DNA, 75 bp, synthetic construct
  source 1..75: mol_type = other DNA
agatggggtttcgggtgctgaaaaaaatcctctatccagtcatcttctcttcggattattccgccgcagaaaaac

SEQ ID NO: 883835 - DNA, 75 bp, synthetic construct
  source 1..75: mol_type = other DNA
tgattatgttttccgctacgggggcgatgaatttatcattgttttgactgaagcttcggaaaacgaaacgttacg

SEQ ID NO: 883836 - DNA, 75 bp, synthetic construct
  source 1..75: mol_type = other DNA
tggctggcaaaaacgcgccatgttacacgcacagtcggggatcagttccgatatcggcaccacgccgggcgcgcg

SEQ ID NO: 883837 - DNA, 75 bp, synthetic construct
  source 1..75: mol_type = other DNA
ccaacgcagatgtaaaacaacgacacaggataatgaaacttttacccgaagaaatgatgctatcttcggcaatca

SEQ ID NO: 883838 - DNA, 75 bp, synthetic construct
  source 1..75: mol_type = other DNA
tctcgcctccgggggaaatacccataaattaagagaaaaaatctgcagtagccgttttagaaaatcacctaaatc

SEQ ID NO: 883839 - DNA, 75 bp, synthetic construct
  source 1..75: mol_type = other DNA
catgggttgccgaggaaaatctggttgccagtctgaaattaaaaacatggggaacggagattaagtcctcattat

SEQ ID NO: 883840 - DNA, 75 bp, synthetic construct
  source 1..75: mol_type = other DNA
gcgcagcaccttcaacagtcactccgtctgccggggcagcagtatgatgaggagtcggggctgtactacaaccgc

SEQ ID NO: 883841 - DNA, 75 bp, synthetic construct
  source 1..75: mol_type = other DNA
aggaaaatttcatggctcttttaagccgaacagataagaaatatgagaataaagaagaggcaagggttattacaa

SEQ ID NO: 883842 - DNA, 75 bp, synthetic construct
  source 1..75: mol_type = other DNA
tatggcgatatattggaatagtagagcatctttattttgttcaactgaattaaactcgaaatcacaatcgcctgc

SEQ ID NO: 883843 - DNA, 75 bp, synthetic construct
  source 1..75: mol_type = other DNA
agtgaactatggaaaaataaattactttccctcggagcattaccagaaaaaataattgtgcaacatatggggata

SEQ ID NO: 883844 - DNA, 75 bp, synthetic construct
  source 1..75: mol_type = other DNA
acaatcacacttctttgagaatagcttcctggtgaaagaagggctgattaaccctgaacgttttgtgccaatgtt

SEQ ID NO: 883845 - DNA, 75 bp, synthetic construct
  source 1..75: mol_type = other DNA
aacgtttctggcgttacctcgacagaaccctgccagacgcctttatgcatgccaatatcggcccgtctgattcgc

SEQ ID NO: 883846 - DNA, 75 bp, synthetic construct
  source 1..75: mol_type = other DNA
atgaaattaagatttatttcgtctgcgctggctgccgcactattcgccgctacgggtagttatgctgccgcacta

SEQ ID NO: 883847 - DNA, 75 bp, synthetic construct
  source 1..75: mol_type = other DNA
attttctggtcaggctgatgcaatcaatgataatttattggccattgcatccagtaccaatacaacaacagcaac

SEQ ID NO: 883848 - DNA, 75 bp, synthetic construct
  source 1..75: mol_type = other DNA
gtgatggcagatatgagcgtacctatatggcctacaaagaaggagaaaacttaaactcatatctacatattaatg

SEQ ID NO: 883849 - DNA, 75 bp, synthetic construct
  source 1..75: mol_type = other DNA
gggagtatgacgagtggggaaacctgctgggcgaggaaagcgcgcagcaccttcagcagtcactccgtctgccgg

SEQ ID NO: 883850 - DNA, 75 bp, synthetic construct
  source 1..75: mol_type = other DNA
tgctgaaactcctcttgttcttactgatatgactggaggagtgactatttattatgatcctgaaacaggtgattc

SEQ ID NO: 883851 - DNA, 75 bp, synthetic construct
  source 1..75: mol_type = other DNA
tattgtaactttcctgatatgaatagttatgatgaaagcgaacattttgaaggtgttgaatttgctgtcggctat

SEQ ID NO: 883852 - DNA, 75 bp, synthetic construct
  source 1..75: mol_type = other DNA
aaccggctgccggacccggagctgcacccggacagtaccctcacagtgtggccggataaccgcatcgcgaaggat

SEQ ID NO: 883853 - DNA, 75 bp, synthetic construct
  source 1..75: mol_type = other DNA
cgacaacggacagctaatccgcatcagcggcccgcaggagagccgggagtaccgttacagcgacacgggaaggct

SEQ ID NO: 883854 - DNA, 75 bp, synthetic construct
  source 1..75: mol_type = other DNA
cgcagcttcggcagcatggcaggcagtaatgcagcatatgaactgaccagcacatacaccctcacagggcagcta

SEQ ID NO: 883855 - DNA, 75 bp, synthetic construct
  source 1..75: mol_type = other DNA
ccgtctggtgctgaccacgcaggcgcagcgggcggaagaggcccgtaaacagcacaccgcttccttattttcccc

SEQ ID NO: 883856 - DNA, 75 bp, synthetic construct
  source 1..75: mol_type = other DNA
acgttaacggctactttatccagttcgctgccaattaatcaagtcatcctacagcctttatctcgttatggaata

SEQ ID NO: 883857 - DNA, 75 bp, synthetic construct
  source 1..75: mol_type = other DNA
cgtcagggagatatgactcagtatggcggtcctattgtccagggttcggcaggtgtaagaattggcgcgcccacc

SEQ ID NO: 883858 - DNA, 75 bp, synthetic construct
  source 1..75: mol_type = other DNA
cggtcaacaaatcgccgttcaccgggaagaaggcatcagcacttacagcagttataacccgcgtgggcaactggt

SEQ ID NO: 883859 - DNA, 75 bp, synthetic construct
  source 1..75: mol_type = other DNA
gagtgagctgccgacagggatagaggatgcgacgggcagtacaaaacagatggcatggagccgttacggtcaact

SEQ ID NO: 883860 - DNA, 75 bp, synthetic construct
  source 1..75: mol_type = other DNA
ggctgaccggcgttcacaccaccgcagcgaatctggatatccgcatcccgtatgccacagacccggcaggtaacc

SEQ ID NO: 883861 - DNA, 75 bp, synthetic construct
  source 1..75: mol_type = other DNA
tatttacctgagcgaaaaattcatctttatcactgtgaccaccgggggctgccgctggcgctcatcagtaccgaa

SEQ ID NO: 883862 - DNA, 75 bp, synthetic construct
  source 1..75: mol_type = other DNA
gtccacaccacggcggcgaacctggatatcgatatcccgtatgcgacggacccggcaggaaaccggctgccggac

SEQ ID NO: 883863 - DNA, 75 bp, synthetic construct
  source 1..75: mol_type = other DNA
accattacgacagccagcaccgtctggtgttctacacgcggatacagcacggcgaaccacaggtggagagccggt

SEQ ID NO: 883864 - DNA, 75 bp, synthetic construct
  source 1..75: mol_type = other DNA
tgttcggtatgtacggcagaaaagtaaagttatcccattctgagatgattgaagataataaaaaagacttggctg

SEQ ID NO: 883865 - DNA, 75 bp, synthetic construct
  source 1..75: mol_type = other DNA
ggacgccgcgcggcgaactggcggtggtgtatgaccgtagtggcaaacaggtgcgcagctttacttacgatgata

SEQ ID NO: 883866 - DNA, 75 bp, synthetic construct
  source 1..75: mol_type = other DNA
gaatatttccccatgaatccgataagttcaaatgataatgatagtgtagacttgcgaaatataaaatgccctgaa

SEQ ID NO: 883867 - DNA, 75 bp, synthetic construct
  source 1..75: mol_type = other DNA
atcacgcgcatcaccacgccggatggcagggcatcggcgttttactataaccaccacagccagttaacgtcagcc

SEQ ID NO: 883868 - DNA, 75 bp, synthetic construct
  source 1..75: mol_type = other DNA
gaccgtgagtatacgtggaacgacaacgggcaactggtgcgcatcagcggcccgcaggagagccgggagtaccgt

SEQ ID NO: 883869 - DNA, 75 bp, synthetic construct
  source 1..75: mol_type = other DNA
cgttaccgttacgacagcgacgggcgggtgacagaacagctaaacccggcaggcttaagctacacgtatcagtat

SEQ ID NO: 883870 - DNA, 75 bp, synthetic construct
  source 1..75: mol_type = other DNA
gtgaaaacggcagccacaccgaccttccgttacgatgtactcgaccggctgatacaggaaaccggctttgacggc

SEQ ID NO: 883871 - DNA, 75 bp, synthetic construct
  source 1..75: mol_type = other DNA
aatcattaacgttgcaaagggtactatttccgccaccagcaccgatgtagtaaacggctctcaattgtacgacct

SEQ ID NO: 883872 - DNA, 75 bp, synthetic construct
  source 1..75: mol_type = other DNA
ggccacggctggctgagagaaatcagccacctgagcgaaggccaccgtgtggcggtccactacggctatgacgat

SEQ ID NO: 883873 - DNA, 75 bp, synthetic construct
  source 1..75: mol_type = other DNA
cgcacctacagcagctaccggacgaagacgcctgcgccggtggggatttttggccccggctggaaagcgccttct

SEQ ID NO: 883874 - DNA, 75 bp, synthetic construct
  source 1..75: mol_type = other DNA
ggcagtatgacgaacgcggctggctgacagacatcagccatatcagcgaagggcaccgggtggcggtgcactatg

SEQ ID NO: 883875 - DNA, 75 bp, synthetic construct
  source 1..75: mol_type = other DNA
gaaatccgttaccgttacgacagcgacgggcgggtgacagaacagcttaacccggcaggcttaagctacacgtat

SEQ ID NO: 883876 - DNA, 75 bp, synthetic construct
  source 1..75: mol_type = other DNA
tggtgttctacacgcggatacagcatggcgagccgctggtcgagagccgctacctctacgacccgctgggacggc

SEQ ID NO: 883877 - DNA, 75 bp, synthetic construct
  source 1..75: mol_type = other DNA
ctataaccaccacagccagttaacgtcagccaccgggccagacgggctggaaatgcgccgcaaatatgatgagta

SEQ ID NO: 883878 - DNA, 75 bp, synthetic construct
  source 1..75: mol_type = other DNA
aataatatccaatggttattccgctataagaataagtataaaagcgccaatacattgacgttggtacttggcaag

SEQ ID NO: 883879 - DNA, 75 bp, synthetic construct
  source 1..75: mol_type = other DNA
ggagtgatggcggtgtacaaccgtagccagtacatcccggaaaaacggttagccttggacaaatggataaaatat

SEQ ID NO: 883880 - DNA, 75 bp, synthetic construct
  source 1..75: mol_type = other DNA
aacatatttacccttacattgggaaaatggcgctcgctgactgcgaaacccgatactggcttgactgcttcgaca

SEQ ID NO: 883881 - DNA, 75 bp, synthetic construct
  source 1..75: mol_type = other DNA
ggattgcggcctttaacaaggcacagaacgccgctgaacgcctgcttttactggcaccgggtaaacgccaggaaa

SEQ ID NO: 883882 - DNA, 75 bp, synthetic construct
  source 1..75: mol_type = other DNA
taatgttgctaaaggtacggtttctgcaaccagcaccgatgtagtaaacggctctcaattgtacgacctgcagca

SEQ ID NO: 883883 - DNA, 75 bp, synthetic construct
  source 1..75: mol_type = other DNA
gtaagccagtggggacgcatcttatacagccgattaggacattcaacgccatggacattgcatgacctgcgacgc

SEQ ID NO: 883884 - DNA, 75 bp, synthetic construct
  source 1..75: mol_type = other DNA
cgaattttaaatacctttaatgaaaagattcggtttatgcttattgattcaggaaaaaaacatcttgatcgtaat

SEQ ID NO: 883885 - DNA, 75 bp, synthetic construct
  source 1..75: mol_type = other DNA
tacgccatcaaaaaatattaaattattttgatggtaaagttaaatctccaactaatgacattattcaactcagct

SEQ ID NO: 883886 - DNA, 75 bp, synthetic construct
  source 1..75: mol_type = other DNA
cactcttattagaaagagcttcaaaacacgcggtagggttaacagtgaaacatttacgggttggagatgttgaaa

SEQ ID NO: 883887 - DNA, 75 bp, synthetic construct
  source 1..75: mol_type = other DNA
cagttgctgggccactcaatgccgggggttatggctatctataaccgtagcctgtacttgcctgagaagctggac

SEQ ID NO: 883888 - DNA, 75 bp, synthetic construct
  source 1..75: mol_type = other DNA
tcaatcaattcacggcgatgaaaatgcaggcattaatctttcaccttatttagaatatggaacattagatactaa

SEQ ID NO: 883889 - DNA, 75 bp, synthetic construct
  source 1..75: mol_type = other DNA
cccctgattcattaaaccaactgtgcattgtgacttattcgtggctcatgggtaatacgctgaatttattaatat

SEQ ID NO: 883890 - DNA, 75 bp, synthetic construct
  source 1..75: mol_type = other DNA
ccgcgactggggattaatcacccgaccgggattgccggtaatccgcagggacgaggcattatcgaacggcttaac

SEQ ID NO: 883891 - DNA, 75 bp, synthetic construct
  source 1..75: mol_type = other DNA
caagtgatagacccaatggggttagatgcgattgagaatatgacatcaggtggactaatttatgccgtatctggt

SEQ ID NO: 883892 - DNA, 75 bp, synthetic construct
  source 1..75: mol_type = other DNA
tagcattgttcagggttctgccggggtacgtattggtgcccccaccggcgtggcctgttcggtgtgccccggcgg

SEQ ID NO: 883893 - DNA, 75 bp, synthetic construct
  source 1..75: mol_type = other DNA
tacctcatgcggaaatcgtgaggactcggcataatttatgtcacgggaacatcctggattacatcaacactgtga

SEQ ID NO: 883894 - DNA, 75 bp, synthetic construct
  source 1..75: mol_type = other DNA
agccgctacctctacgacccgctgggacggcgaatggcaaaacgggtctggcggcgggagcgtgacctgacgggg

SEQ ID NO: 883895 - DNA, 75 bp, synthetic construct
  source 1..75: mol_type = other DNA
gcacagtgagttaccggcgacgacaacggatgcgacgggcagcacccggcagatgacctggagccgctacgggca

SEQ ID NO: 883896 - DNA, 75 bp, synthetic construct
  source 1..75: mol_type = other DNA
cggttatgatatggatgctattgttggcggagctcataatggggccgccgatgcaatgagacattgttacttgat

SEQ ID NO: 883897 - DNA, 75 bp, synthetic construct
  source 1..75: mol_type = other DNA
acaaagagggctcgcgtgtggtttattttatgacctgggccagcaaggataaacccgagcaaactgaaaaactgg

SEQ ID NO: 883898 - DNA, 75 bp, synthetic construct
  source 1..75: mol_type = other DNA
gcctgcccgtgcgcacattcgtcatggttgataaaacaaccggagttgagaagaacattgattacggcacagttc

SEQ ID NO: 883899 - DNA, 75 bp, synthetic construct
  source 1..75: mol_type = other DNA
tgacatggtacgggtgggacggtgacaggctgacgacgatacagaccggcaccacgcgtatccagacggtatacc

SEQ ID NO: 883900 - DNA, 75 bp, synthetic construct
  source 1..75: mol_type = other DNA
aggggtgccggtagaattactttcatttccagccgagcaggatatgttggttaaggtagcagccgggagaacacc

SEQ ID NO: 883901 - DNA, 75 bp, synthetic construct
  source 1..75: mol_type = other DNA
ctcctgaagaccaggctgagtacgatgcttatatggcaaggttcagcgaggtaaatcactattatgagcattgca

SEQ ID NO: 883902 - DNA, 75 bp, synthetic construct
  source 1..75: mol_type = other DNA
acgtctcgcggttgtacggtgacgtgcgcgcagtagatggcgtcagtattgcgataaaagatggtgagttcttct

SEQ ID NO: 883903 - DNA, 75 bp, synthetic construct
  source 1..75: mol_type = other DNA
caggcaacggcgcaacgactgccccgacggtgaccacaaagccggacggtacggtggagatctctgtcaccagtc

SEQ ID NO: 883904 - DNA, 75 bp, synthetic construct
  source 1..75: mol_type = other DNA
cagagtatagcagtattaaaaaaccatggcagtggcaacctgatgactacctgctttacaatgcagcattaaaag

SEQ ID NO: 883905 - DNA, 75 bp, synthetic construct
  source 1..75: mol_type = other DNA
ttactcgcactgaacaaagagccataagagaatatgaaatcacggcttactttatagaaatgaataaagatagca

SEQ ID NO: 883906 - DNA, 75 bp, synthetic construct
  source 1..75: mol_type = other DNA
attggttgataccctttattctgctattgatagcaattcaaaagaatatgccacatgggattcacagacttacat

SEQ ID NO: 883907 - DNA, 75 bp, synthetic construct
  source 1..75: mol_type = other DNA
acgccggacacaccgacatagcacagtcctttatggcaatccgtcgtgccaccaccgccagcggcaaccgcccga

SEQ ID NO: 883908 - DNA, 75 bp, synthetic construct
  source 1..75: mol_type = other DNA
ctgatgtgcgagttcgtggacgatctcgcgtccgtgttcccgctcagcgaactgcaggcgtgcatggtggacagc

SEQ ID NO: 883909 - DNA, 75 bp, synthetic construct
  source 1..75: mol_type = other DNA
ctctttgagttaattgttactgttttctctgtatttgactcacatcaaaaggagatgatgttagctaatggtgat

SEQ ID NO: 883910 - DNA, 75 bp, synthetic construct
  source 1..75: mol_type = other DNA
tttgagcgcgtacgtggacgattgcatcctaccgtgcaaggactgcgtctgtttgaagaagtgcaacgatcctgg

SEQ ID NO: 883911 - DNA, 75 bp, synthetic construct
  source 1..75: mol_type = other DNA
acctaccagtggtggattggtgcctgtaacgagctggttaccgaaagcttaagcccgattacgaaaacgccggaa

SEQ ID NO: 883912 - DNA, 75 bp, synthetic construct
  source 1..75: mol_type = other DNA
tatgatgagcgcggcctgctcagcaacatcaccgaccctgccgggcagacatggacgcagcagtgtgatgagcgc

SEQ ID NO: 883913 - DNA, 75 bp, synthetic construct
  source 1..75: mol_type = other DNA
ctgtaccgtatcaatggtggcgctggtggggcagccttcgggctggccggtatccgttgaggccggtattctcac

SEQ ID NO: 883914 - DNA, 75 bp, synthetic construct
  source 1..75: mol_type = other DNA
gggctggcagcgttctgaataaaggtttgcagtgcagccgttccagcctggcgggcaaaaacaaactgcaggagc

SEQ ID NO: 883915 - DNA, 75 bp, synthetic construct
  source 1..75: mol_type = other DNA
gactgccaccgctgcgctgtcggctgaagatatcgcggccgccaaactgctgggtaaaaccgaagccgagttcct

SEQ ID NO: 883916 - DNA, 75 bp, synthetic construct
  source 1..75: mol_type = other DNA
ttttccacaactggtgccagagacgctatgactggaatatagataccgcggaaatcgtgctttcaccaggcatta

SEQ ID NO: 883917 - DNA, 75 bp, synthetic construct
  source 1..75: mol_type = other DNA
gcggttacttcacgccgggatcgtataccgtttctgctcacgtcccgttgggatcggtggttggcgcgacgccag

SEQ ID NO: 883918 - DNA, 75 bp, synthetic construct
  source 1..75: mol_type = other DNA
tcccaaaatgttgttgacaataatggatttcttggctcagttgctcgccctggagagtttcctattgccatgtgt

SEQ ID NO: 883919 - DNA, 75 bp, synthetic construct
  source 1..75: mol_type = other DNA
gccatcgcaaaaggagcggcggctaaggggcataatattctcgaaaaaaccattaaaccaagctcaatagaaaaa

SEQ ID NO: 883920 - DNA, 75 bp, synthetic construct
  source 1..75: mol_type = other DNA
cgctggaatctgcaaccgctactgcaaagtgcacagttaacaggaatgacagtcacaatcaagtccagtacctgt

SEQ ID NO: 883921 - DNA, 75 bp, synthetic construct
  source 1..75: mol_type = other DNA
ggcgcaaagcctgcttgcaacctacatcaaactgaacgtcgcccgtcatcagcaagggcagccgctatctctgcc

SEQ ID NO: 883922 - DNA, 75 bp, synthetic construct
  source 1..75: mol_type = other DNA
caacagcgcccacaagattatgccgggctggtggtgcgcgttgccggatacagcgccttctttgtcgaactgtcg

SEQ ID NO: 883923 - DNA, 75 bp, synthetic construct
  source 1..75: mol_type = other DNA
gcgtttgttgagcgcccggtatctatggcactggctgtctgtttctttttggttgtcgcgttgcaaggacgcaat

SEQ ID NO: 883924 - DNA, 75 bp, synthetic construct
  source 1..75: mol_type = other DNA
cattaaaacttactaatcaaagtaaaaaactgccctatctggcccaaacatggatagaagatacgaaaggcaata

SEQ ID NO: 883925 - DNA, 75 bp, synthetic construct
  source 1..75: mol_type = other DNA
atgaagtacaattttgatgaaattatcaacagaaaaaatactgatgccctgaactacgatgggtggagacaatat

SEQ ID NO: 883926 - DNA, 75 bp, synthetic construct
  source 1..75: mol_type = other DNA
cgtgaatttacagtttttccttggctacccggtaggctttttctctaccaggcccattgataaattgactgcgct

SEQ ID NO: 883927 - DNA, 75 bp, synthetic construct
  source 1..75: mol_type = other DNA
aaaattcttcgttatacagaccatgaaccctacgggggaatgcgtacacaaataattaaagagatattttttgca

SEQ ID NO: 883928 - DNA, 75 bp, synthetic construct
  source 1..75: mol_type = other DNA
atgcactaccgacaattactcccctttcttttatcaggatttcttctgttatctccctcgatttttgctgctgaa

SEQ ID NO: 883929 - DNA, 75 bp, synthetic construct
  source 1..75: mol_type = other DNA
acagcacggtgagccgcaggtggagagccgctacctctatgacccgctgggccgccggacgggaaaacgggtgtg

SEQ ID NO: 883930 - DNA, 75 bp, synthetic construct
  source 1..75: mol_type = other DNA
gcccgtgtggcaatgccatgtaagttagcgatgaatatggcgcaaaaaaagcgcggccgtcggattaacgccgcg

SEQ ID NO: 883931 - DNA, 75 bp, synthetic construct
  source 1..75: mol_type = other DNA
gtgttcagccatatgacccacctcaaccggatgcgcgaacgttttactgatgtgcacaccctgcgcgtcactggc

SEQ ID NO: 883932 - DNA, 75 bp, synthetic construct
  source 1..75: mol_type = other DNA
cgcttcctctatttttggtctttcttgttccttagttggatttctactcaaaaagaaagtgattattaagatctc

SEQ ID NO: 883933 - DNA, 75 bp, synthetic construct
  source 1..75: mol_type = other DNA
gaactctaaatatcaatattcctgggcgtagcgctcttcttttagggaaaacaggagaaccgctgaactatctct

SEQ ID NO: 883934 - DNA, 75 bp, synthetic construct
  source 1..75: mol_type = other DNA
ccactgggtaaagtcagtaaaaatgctttttcaggtgtaggtagtctggcgtcaccacagcagttcagtattaag

SEQ ID NO: 883935 - DNA, 75 bp, synthetic construct
  source 1..75: mol_type = other DNA
ctccgatacagcggatcaaactgttcctcttggaaaagtcagtaaaaatgcattttcaggcgtaggtagcatggc

SEQ ID NO: 883936 - DNA, 75 bp, synthetic construct
  source 1..75: mol_type = other DNA
cgaacgttcaagggccggtgacggtcagctaaatactcaggctaaccgctatgtattgcagctaggcggcgattt

SEQ ID NO: 883937 - DNA, 75 bp, synthetic construct
  source 1..75: mol_type = other DNA
tcattaaagcgggaaatgtgcgcgcgttagcggtcgaacgttttgacaggcgttggaatgctgagcgaacggttt

SEQ ID NO: 883938 - DNA, 75 bp, synthetic construct
  source 1..75: mol_type = other DNA
ggcatgattagagaagaaaatgactttcgcatctcggttgctggcgcacaggagaagacagcactgctcagaata

SEQ ID NO: 883939 - DNA, 75 bp, synthetic construct
  source 1..75: mol_type = other DNA
atgaaaatgaaaaaaatatatattgcagggcatagagggatggttggttctgcaatcaaacgtcagttaatgaag

SEQ ID NO: 883940 - DNA, 75 bp, synthetic construct
  source 1..75: mol_type = other DNA
ctctgctctccgcatttgatatcaaaattggccgactgtcggccagcgtcaggaaacagactttgaccgagtctg

SEQ ID NO: 883941 - DNA, 75 bp, synthetic construct
  source 1..75: mol_type = other DNA
ctctggaacgcgacaacaccgctgcgcttactcacgcgatgttgcagtctgacagtgaaaataccacatcggtaa

SEQ ID NO: 883942 - DNA, 75 bp, synthetic construct
  source 1..75: mol_type = other DNA
tagtttactgggatggccaagtattaaaatcaacgactgaaattaaaaattatgatgggtcgacgcgtgttggcg

SEQ ID NO: 883943 - DNA, 75 bp, synthetic construct
  source 1..75: mol_type = other DNA
ccggaggatggtcctatcgttcagcagtttaaagaacaactagatgcgataaacagaaaatatgataaaagcgag

SEQ ID NO: 883944 - DNA, 75 bp, synthetic construct
  source 1..75: mol_type = other DNA
aaatcgttgtcccggcactggcgctgctggcgacagcggtcagtttctccagccacgcttcggtgacgcccgaca

SEQ ID NO: 883945 - DNA, 75 bp, synthetic construct
  source 1..75: mol_type = other DNA
catcatgatgccaccgtcctgggaataagcagttgtaaaaatggtaggggaatggaactgaatccagtcattgca

SEQ ID NO: 883946 - DNA, 75 bp, synthetic construct
  source 1..75: mol_type = other DNA
aacattaataccgaccccaggctggcgctggatgcggcttataagctggcgcagttcacgcaccataaaaagggg

SEQ ID NO: 883947 - DNA, 75 bp, synthetic construct
  source 1..75: mol_type = other DNA
gctggttattcggcgaagaccgccagggttaaaggctcgcagctggcaaaagatccggaggtgcttgcgtttata

SEQ ID NO: 883948 - DNA, 75 bp, synthetic construct
  source 1..75: mol_type = other DNA
atgaggagaacccgcatcacctgcaccagccgtaccggctgccggggcagcagtatgataaggagtcggggctgt

SEQ ID NO: 883949 - DNA, 75 bp, synthetic construct
  source 1..75: mol_type = other DNA
aggcagaatactaaagatattaatgggtggataaaagatgaacggatagtatatccctcaagggtgatcaactag

SEQ ID NO: 883950 - DNA, 75 bp, synthetic construct
  source 1..75: mol_type = other DNA
tattcttcttatataaataacatttatcttaatgtattgcctttttatggtttgcaaaaaaaaattcttttgatt

SEQ ID NO: 883951 - DNA, 75 bp, synthetic construct
  source 1..75: mol_type = other DNA
agatgagaaaatagttaaaagtaaagataacaatatcaagtcattttatttaggtacgcccagtggtaattttaa

SEQ ID NO: 883952 - DNA, 75 bp, synthetic construct
  source 1..75: mol_type = other DNA
ttacgtacgcatcaaaaggcctttattgcccgtgggctgacagaggcgttaacacgcgtgattgccatcgtggtg

SEQ ID NO: 883953 - DNA, 75 bp, synthetic construct
  source 1..75: mol_type = other DNA
atcgcgaggtgaaatctgaaggaagccggatgcaaaatgctggcctgacgaacaggaagcggctaaggcggcaca

SEQ ID NO: 883954 - DNA, 75 bp, synthetic construct
  source 1..75: mol_type = other DNA
tagtcttaatgcgaaaatctgagtatttgagcagacaacaacttgctgatttaacaggggttccgtatggcacgc

SEQ ID NO: 883955 - DNA, 75 bp, synthetic construct
  source 1..75: mol_type = other DNA
aatgacctgctgatctatatgcaggacggcacggtgatccgctgcaacggttatttcctgcaagcggcaaatacc

SEQ ID NO: 883956 - DNA, 75 bp, synthetic construct
  source 1..75: mol_type = other DNA
gcattgagcacaatcaggcgctggtgataacaggtagcagcaccgggctgacggcaggaacggcattaacggtcg

SEQ ID NO: 883957 - DNA, 75 bp, synthetic construct
  source 1..75: mol_type = other DNA
agtgttagcgttccagcggcggatattcaggcgctgggtaacggcgacctgacagttaacgtctcggtcaccaat

SEQ ID NO: 883958 - DNA, 75 bp, synthetic construct
  source 1..75: mol_type = other DNA
ccaccgacgcgtcgggcaactggaccttaaccgtgccggtgagcgatctggcggcattaggtcaggccaactata

SEQ ID NO: 883959 - DNA, 75 bp, synthetic construct
  source 1..75: mol_type = other DNA
gatgatatcgtcaacagcatcgagcatggtcaggcactggtgatcactggtggcagtagtggcctgaatgcaggt

SEQ ID NO: 883960 - DNA, 75 bp, synthetic construct
  source 1..75: mol_type = other DNA
aagtgcgggcgaacacacctggtcggtggtgcaaattgttgggagcaccattaccaacgccgggtcgataacgtt

SEQ ID NO: 883961 - DNA, 75 bp, synthetic construct
  source 1..75: mol_type = other DNA
ggtgatgatgtgatcaacgccgtcgaaaaaggcgaaacgctggtcgtaagcggcagcaccagcggtgtggaagcc

SEQ ID NO: 883962 - DNA, 75 bp, synthetic construct
  source 1..75: mol_type = other DNA
caccggcaccgtccaggcggacggtagctggagcgtcagcgtaccgacggcggatctcagcaatctgaccgccag

SEQ ID NO: 883963 - DNA, 75 bp, synthetic construct
  source 1..75: mol_type = other DNA
ggtactggcggatggctcatggagcgtcggcgttccggcggcagatgtcagcgcctggcctgcggggacggtcac

SEQ ID NO: 883964 - DNA, 75 bp, synthetic construct
  source 1..75: mol_type = other DNA
ccagcggtgaagtggtttacctctaccgtaacggcctgctgttaggcgcggtaacgatggtaggcgcactgaact

SEQ ID NO: 883965 - DNA, 75 bp, synthetic construct
  source 1..75: mol_type = other DNA
aaaaaggcagcgatttgcagctttccggcaccacctccggcgtggaagtgggacagaccatcaccgttatcttcg

SEQ ID NO: 883966 - DNA, 75 bp, synthetic construct
  source 1..75: mol_type = other DNA
aaagccggaaatccggcttcggcaacgcataatctgacggtggaccttgccgctccggtcgtcaccatcaacacg

SEQ ID NO: 883967 - DNA, 75 bp, synthetic construct
  source 1..75: mol_type = other DNA
ggccagtgtcagcagcgcgagcggcaacagcgcgtcggcaactcatgcgtatagcgttgacgccagcgcaccgac

SEQ ID NO: 883968 - DNA, 75 bp, synthetic construct
  source 1..75: mol_type = other DNA
ggtgatcaccggcggcagtagcggcctgaatgcaggtgctgtgctgacggttaccatcaacagtgtggcgtattc

SEQ ID NO: 883969 - DNA, 75 bp, synthetic construct
  source 1..75: mol_type = other DNA
gggctggcggtggatctcaccgttcccgtattaaccatcaacaccgtctccggcgatgacattattaacgccgcc

SEQ ID NO: 883970 - DNA, 75 bp, synthetic construct
  source 1..75: mol_type = other DNA
aaatttccggtaccagcaatcagccagcaggcaccacaataacggtgacgctgaacgggcaaaattacactgcca

SEQ ID NO: 883971 - DNA, 75 bp, synthetic construct
  source 1..75: mol_type = other DNA
gttcccacttcagccttaggcgcgctgaccgcaagcaattacaccgtcagcgccacggtcaacgacaaagcgggc

SEQ ID NO: 883972 - DNA, 75 bp, synthetic construct
  source 1..75: mol_type = other DNA
gcgggtacgcaggtaaccgttacgctcaacgggcaaaattacaccaccacagccgatgcttccgggaactggagc

SEQ ID NO: 883973 - DNA, 75 bp, synthetic construct
  source 1..75: mol_type = other DNA
tggacggtgaatgtgccgcctgccgatctcgctgcgctgccggacggcgcgggcaacgtgcaggcgagcgtcagc

SEQ ID NO: 883974 - DNA, 75 bp, synthetic construct
  source 1..75: mol_type = other DNA
taatttcgcgacaggcacggtggtgaccgtgttgcttaatggcaagggctacagcgccaccattcagaacaacgg

SEQ ID NO: 883975 - DNA, 75 bp, synthetic construct
  source 1..75: mol_type = other DNA
tgccagcgacgacgtgattaacgccgccgaaaaaggcaccgacctgaccctttctggcagcaccagcggaattga

SEQ ID NO: 883976 - DNA, 75 bp, synthetic construct
  source 1..75: mol_type = other DNA
ccgacggcggatgttacggcgctcggtagcggcgcacagagcatcaccgccagcgttagcgatagggcgggcaac

SEQ ID NO: 883977 - DNA, 75 bp, synthetic construct
  source 1..75: mol_type = other DNA
cggcacaggaacctggctggcgaacggcggcatggacgtggtcgatttccgtctctcaacggtgggcgtcaccgc

SEQ ID NO: 883978 - DNA, 75 bp, synthetic construct
  source 1..75: mol_type = other DNA
tgaccggttcgctgggagcggggcttgccagcggcgaagtggcgcagattagccttgatagcggcgcgacctgga

SEQ ID NO: 883979 - DNA, 75 bp, synthetic construct
  source 1..75: mol_type = other DNA
atcaacaacgccgaacagcttgccgggcagactatcagcggcaccaccaccgccgaagtaggtcagactgtcacc

SEQ ID NO: 883980 - DNA, 75 bp, synthetic construct
  source 1..75: mol_type = other DNA
gcggcgggcgatgtggtcacggttaacctgaacggtaaaaactacaccaccacgctggacgcttccggtaactgg

SEQ ID NO: 883981 - DNA, 75 bp, synthetic construct
  source 1..75: mol_type = other DNA
gcaaaccgtcaccgtcacttttggcggtaaaacctacaccgcaagcgtcgccgccaacgggagctggagcgtgaa

SEQ ID NO: 883982 - DNA, 75 bp, synthetic construct
  source 1..75: mol_type = other DNA
aattgtttttttgagggctgtaaatttgagaatgtgtcacttataagctccaggtgtcgagtaaaactaaataat

SEQ ID NO: 883983 - DNA, 75 bp, synthetic construct
  source 1..75: mol_type = other DNA
atactggttccgtgtaggccggatcatggaagaggaagaagatgcacttatcgatgaagttgctgatgatgctag

SEQ ID NO: 883984 - DNA, 75 bp, synthetic construct
  source 1..75: mol_type = other DNA
acatggagccttggcgttccggcggcaaatgtaggcaactggcctgcgggtacggtgaatatcacggtttcaggt

SEQ ID NO: 883985 - DNA, 75 bp, synthetic construct
  source 1..75: mol_type = other DNA
aaccctttccggcaccaccactaacgtagaacccggtcaaaccgtcaccgtcacctttggcgggaaaaattacac

SEQ ID NO: 883986 - DNA, 75 bp, synthetic construct
  source 1..75: mol_type = other DNA
ctaattttgcgacaggcacggtggtgaccgtgttgcttaacggcaaaggctacagcgccgccattcaaagcaacg

SEQ ID NO: 883987 - DNA, 75 bp, synthetic construct
  source 1..75: mol_type = other DNA
gtcgctcccgtgcaatgacctacaatcccaacatgcctggagttcactccgatccatctctggtggcacgtcaaa

SEQ ID NO: 883988 - DNA, 75 bp, synthetic construct
  source 1..75: mol_type = other DNA
ccagcaccgttaatgaaatctcgtggatcacagacgatgcctcatatcaaaaagccaaaaagaagattatctcgc

SEQ ID NO: 883989 - DNA, 75 bp, synthetic construct
  source 1..75: mol_type = other DNA
ccgcgatgaattatgaaaggtgctaccagtttattagccgtacatctatccgtaatgctgacactgatcaccctc

SEQ ID NO: 883990 - DNA, 75 bp, synthetic construct
  source 1..75: mol_type = other DNA
gatattatccagacgaaaaaagctatcgcactggaagagaagcgccagcgtgagaaagaagccagcctcaagcgc

SEQ ID NO: 883991 - DNA, 75 bp, synthetic construct
  source 1..75: mol_type = other DNA
gaactccagaaattagacatgggaacctttgttacctacgtccggcagttgggtaaacaattcggctggacagag

SEQ ID NO: 883992 - DNA, 75 bp, synthetic construct
  source 1..75: mol_type = other DNA
cagcaatgccgcagcgcagtggattaaagataagacgggttttgatcctcgtgtcatcggtcagacgcttaaaca

SEQ ID NO: 883993 - DNA, 75 bp, synthetic construct
  source 1..75: mol_type = other DNA
tactggtcgacagcggcctgccgggtgtcaccattaacaccgtggcgggcgacgatattatcaacgccgccgaag

SEQ ID NO: 883994 - DNA, 75 bp, synthetic construct
  source 1..75: mol_type = other DNA
ggcgcagcgctgacggtcaccatcaacggtgtggcctatgccgccacggtacaggcagacgggagctggagtgtc

SEQ ID NO: 883995 - DNA, 75 bp, synthetic construct
  source 1..75: mol_type = other DNA
tgaccgttacgttgaatgggcaaacctatcagggcatcgtgcagtccgacggcacctggagcgtgaccgttcccg

SEQ ID NO: 883996 - DNA, 75 bp, synthetic construct
  source 1..75: mol_type = other DNA
tccggcaactggagcgtcggcgttccggcggcggatgtcaccgcgctgggcagcggcccgcaaactgttaccgcc

SEQ ID NO: 883997 - DNA, 75 bp, synthetic construct
  source 1..75: mol_type = other DNA
ggaaacatcggtgattttgtcaaagtcacccagagcggcagcgacaccatcgtgcagatcgaccgcgacggcacg

SEQ ID NO: 883998 - DNA, 75 bp, synthetic construct
  source 1..75: mol_type = other DNA
ggtgccactagcgcaggaaacccggtcactatcacccatccggtcaccgtcgatctggcggcggtggcgatctcc

SEQ ID NO: 883999 - DNA, 75 bp, synthetic construct
  source 1..75: mol_type = other DNA
accatcaacaccattgcgggcgatgacattattaacgctgccgaacacgggcaggcgctggtgatttccggctcc

SEQ ID NO: 884000 - DNA, 75 bp, synthetic construct
  source 1..75: mol_type = other DNA
tccggcaccacctccggcgtggaagcggggcagaccatcaccgttatcttcggtggcaaaagctacaccaccacg

SEQ ID NO: 884001 - DNA, 75 bp, synthetic construct
  source 1..75: mol_type = other DNA
actacagcgccaccaccgactcctctggcaactggagcgtcaccgttcctgcctcggcggtcagtgcgctgggcg

SEQ ID NO: 884002 - DNA, 75 bp, synthetic construct
  source 1..75: mol_type = other DNA
tactggtcgacagcggcctgccgggcgtcaccatcaacaccgtggcaggcgacgatattatcaacgccgccgaag

SEQ ID NO: 884003 - DNA, 75 bp, synthetic construct
  source 1..75: mol_type = other DNA
agcgtcaccgatgccggaggaaacagcggcagcgccacccatcaggtgacggtcaataccgggctgccgaccatt

SEQ ID NO: 884004 - DNA, 75 bp, synthetic construct
  source 1..75: mol_type = other DNA
gggctataacgacaccttcttcgccaccgcaggcaccgacacttacgacggctccggcggctgggtgtacagctc

SEQ ID NO: 884005 - DNA, 75 bp, synthetic construct
  source 1..75: mol_type = other DNA
gacgccaacggcaactggagcatcggcgtgcctgccagcgtcatttccgcgctggcgcagggcgatgtgaccatt

SEQ ID NO: 884006 - DNA, 75 bp, synthetic construct
  source 1..75: mol_type = other DNA
tcagcgggcaggtgacgggtgccgcggcgggagataccgttaccatcacgctgggcggcaacacctacaccgcca

SEQ ID NO: 884007 - DNA, 75 bp, synthetic construct
  source 1..75: mol_type = other DNA
tcgacgccaatctgcctggcctgcgggtcgataccgtggcgggcgatgatgttattaacagcattgagcacaatc

SEQ ID NO: 884008 - DNA, 75 bp, synthetic construct
  source 1..75: mol_type = other DNA
ctcggtaagcgataaagcgggtaacccggcgtccgctaaccacgggctggcggtggatctcaccgtgccggtgct

SEQ ID NO: 884009 - DNA, 75 bp, synthetic construct
  source 1..75: mol_type = other DNA
cgtggcgggcgatgatatcgtcaacagcatcgagcacgggcaggcgctggtgatcaccggcggcagtagcggcct

SEQ ID NO: 884010 - DNA, 75 bp, synthetic construct
  source 1..75: mol_type = other DNA
gtttccggcgacgatgtgattaacgccgccgaaaaaggggcagatttaaccctttccggcagcacctccggcgtg

SEQ ID NO: 884011 - DNA, 75 bp, synthetic construct
  source 1..75: mol_type = other DNA
aatcacaacctgacggtggatacgtccgttccggtcgtcaccatcaacacggtggcaggcgatgatgtgatcaac

SEQ ID NO: 884012 - DNA, 75 bp, synthetic construct
  source 1..75: mol_type = other DNA
tttgtaaatatattaactcacctgctggaaatattgcatctttatcgttatgaggttaattctaaattcatccct

SEQ ID NO: 884013 - DNA, 75 bp, synthetic construct
  source 1..75: mol_type = other DNA
tggatctccttcttgtgatgtttatgaggaaatattcaagaaagttattttcacccctgatgaatgtgatctggt

SEQ ID NO: 884014 - DNA, 75 bp, synthetic construct
  source 1..75: mol_type = other DNA
atgaatagctatataaaaattgatcagaccggaagtaataaatttaaaatcactgatctgtatcgtgagttcaat

SEQ ID NO: 884015 - DNA, 75 bp, synthetic construct
  source 1..75: mol_type = other DNA
acggtaaccgtcacgcttaatggtgtgacttacagcggctccgtccaggcggacggcagctggagcgtcagctta

SEQ ID NO: 884016 - DNA, 75 bp, synthetic construct
  source 1..75: mol_type = other DNA
gcgaaaatattatccataacgacgctgaaaatgatgtccgcaatctaaggagaaatatctcaggcaatattacga

SEQ ID NO: 884017 - DNA, 75 bp, synthetic construct
  source 1..75: mol_type = other DNA
ttatttcttgtttatccagtcgtaccgggattggaaatttgttttatgcctgttcacaagcatttcatgttgcta

SEQ ID NO: 884018 - DNA, 75 bp, synthetic construct
  source 1..75: mol_type = other DNA
aaccgggcagacggtgaccgtcacccttaacggcgcaacctacaccggcactgtgcaggcggacggtagctggag

SEQ ID NO: 884019 - DNA, 75 bp, synthetic construct
  source 1..75: mol_type = other DNA
ccgccagccagtacacggttagcgcctcggtaaacgacaaagcgggtaacccggcgtccaccacccacggtctgg

SEQ ID NO: 884020 - DNA, 75 bp, synthetic construct
  source 1..75: mol_type = other DNA
tgacttacaccggcaccgtccaggcggacgggaactggagcgtcagcgtgccgacggcggatctcagcaatctga

SEQ ID NO: 884021 - DNA, 75 bp, synthetic construct
  source 1..75: mol_type = other DNA
atcatcaacccgcagtcgggtatgggggttaacgacacctcggcgctggtcaacttctacgggctgaatgccgga

SEQ ID NO: 884022 - DNA, 75 bp, synthetic construct
  source 1..75: mol_type = other DNA
ggcggcggtcgccatcaccattaacaccctttccggcgatgatgtgatcaacgccgtggagaaaggcgaaacgct

SEQ ID NO: 884023 - DNA, 75 bp, synthetic construct
  source 1..75: mol_type = other DNA
cggtgctggatgccagcggtaactggagcgttggcgtcccggcaagcgtcgtctcggcgctggcaaacggtacgg

SEQ ID NO: 884024 - DNA, 75 bp, synthetic construct
  source 1..75: mol_type = other DNA
caataccgcgctgcctggcgtcacccttaatccggtggcgagcgacgacattattaacgctgccgaatcgggcgt

SEQ ID NO: 884025 - DNA, 75 bp, synthetic construct
  source 1..75: mol_type = other DNA
caacagcagcacgcagacgcacaacgtacaggtgaacacggcggcagtgtcgctttcggtcagcaccatcagcgg

SEQ ID NO: 884026 - DNA, 75 bp, synthetic construct
  source 1..75: mol_type = other DNA
caacagcagcacgcagacgcacaacgtacaggtgaacacggcggcagtgtcgctctcggtcagcactatcagcgg

SEQ ID NO: 884027 - DNA, 75 bp, synthetic construct
  source 1..75: mol_type = other DNA
atgacgtgattaacgccaccgaaaaaggcgcggatctgcaaatttccggcaccagtaatcagccagcaggcacca

SEQ ID NO: 884028 - DNA, 75 bp, synthetic construct
  source 1..75: mol_type = other DNA
tttggcggggaatatcacctcctccagtgattttgtcctgacggtcgatacctctattccgaccacgctggcgca

SEQ ID NO: 884029 - DNA, 75 bp, synthetic construct
  source 1..75: mol_type = other DNA
aacggcaccaccacctggcaggtgcgggtggtcgatctggcgggcaacgttggcgcaaccggcagccagtcggcg

SEQ ID NO: 884030 - DNA, 75 bp, synthetic construct
  source 1..75: mol_type = other DNA
ccggcgcaggtgctcaccatcgccagcatcagcaccgacacggggagttcggcaactgactttatcaccagcgac

SEQ ID NO: 884031 - DNA, 75 bp, synthetic construct
  source 1..75: mol_type = other DNA
cggatagccccaataatgacgatgttttagccgcatctgaaaaatgggacgcctgtaaacccccctataccagcg

SEQ ID NO: 884032 - DNA, 75 bp, synthetic construct
  source 1..75: mol_type = other DNA
cagtgccgtgagtgataatacacagcctgagtctgcatctgtgtggatgaagattacgggcggaagaacctctgg

SEQ ID NO: 884033 - DNA, 75 bp, synthetic construct
  source 1..75: mol_type = other DNA
ttaatattatttctgtagagggaaattctgatgcagcattctctctgaagaaccgcgtggttgccggagcttatg

SEQ ID NO: 884034 - DNA, 75 bp, synthetic construct
  source 1..75: mol_type = other DNA
tctgctactgtgaatggcagtcttgttaataacaaaaatatcattctgaatccaacaaaagaaagtgcaggtaat

SEQ ID NO: 884035 - DNA, 75 bp, synthetic construct
  source 1..75: mol_type = other DNA
aaaaggcccggttctttatctataactcgaaacaattgcaccagttagagagtttttcttctgacagtggcatca

SEQ ID NO: 884036 - DNA, 75 bp, synthetic construct
  source 1..75: mol_type = other DNA
cgccaagctaaatcttgatatcgagatggaaacggggactggcaagacctattgctacatcaagacgattttcga

SEQ ID NO: 884037 - DNA, 75 bp, synthetic construct
  source 1..75: mol_type = other DNA
aggaaaaacaacatccactacaatagagagttcaggagctcagaacgttggaatatcaggtacagcaataagtac

SEQ ID NO: 884038 - DNA, 75 bp, synthetic construct
  source 1..75: mol_type = other DNA
gtatcaaagtgtcaacgatacatggagtaaaaggtggagagtatgacactgttatatcattcggattattacaag

SEQ ID NO: 884039 - DNA, 75 bp, synthetic construct
  source 1..75: mol_type = other DNA
gtggataacgggcaacgacatcatcatctttacccgtctcattggccattattatggtttgctctgctggcggcg

SEQ ID NO: 884040 - DNA, 75 bp, synthetic construct
  source 1..75: mol_type = other DNA
aacgtgcaaatgccgaactagcaaaaatgaagaatgcaacgccggataatccaattaagtctgtaacttttttta

SEQ ID NO: 884041 - DNA, 75 bp, synthetic construct
  source 1..75: mol_type = other DNA
aatgtttccgggggcactgtctcaggagcaaatgtaaacctgagtggccggttaaacgcttttgcaggcaatgtg

SEQ ID NO: 884042 - DNA, 75 bp, synthetic construct
  source 1..75: mol_type = other DNA
agctccggtggccaacagcgtgtcagtagtggtggcgttgcctcgaacaccactattaatagttctggcgcacaa

SEQ ID NO: 884043 - DNA, 75 bp, synthetic construct
  source 1..75: mol_type = other DNA
agttttcagcagcgcgttcgacaccatcttgccggatctggcggtgctgagcggtgtgccgattctggttagtgg

SEQ ID NO: 884044 - DNA, 75 bp, synthetic construct
  source 1..75: mol_type = other DNA
ataccaatgacgttgacgattcaattgcgccatcattccaccaggctaaggctagtggacagttagcgccaatgc

SEQ ID NO: 884045 - DNA, 75 bp, synthetic construct
  source 1..75: mol_type = other DNA
ttgtgctgttgcaatctatagtaccagtgttcgccgtggataatacgtattcttttttttggtcctctacaactc

SEQ ID NO: 884046 - DNA, 75 bp, synthetic construct
  source 1..75: mol_type = other DNA
ggtgatgtatgaaattctcaaagcaggcggtttcaccaccggtggtctgaacttcgatgccaaagtacgtcgtca

SEQ ID NO: 884047 - DNA, 75 bp, synthetic construct
  source 1..75: mol_type = other DNA
aagcgtttttgttagaagtaaactgaaagctaaagggggggggaggcaatcaggaaatataattatgagtgttac

SEQ ID NO: 884048 - DNA, 75 bp, synthetic construct
  source 1..75: mol_type = other DNA
cctgctggcgctgaaaggaaatcagggaaaattagcggaggcgtttgataacgggtactcgccgacaatgtggct

SEQ ID NO: 884049 - DNA, 75 bp, synthetic construct
  source 1..75: mol_type = other DNA
gctatctgtttgcgctggtagctggtgacttcgatgtacttcgcgacaccttcactacccgctccggtcgcgaag

SEQ ID NO: 884050 - DNA, 75 bp, synthetic construct
  source 1..75: mol_type = other DNA
agtgttagcaactgataattcgaaaattgaaattagcattcaacagttgcccagggatttttctttaattagaga

SEQ ID NO: 884051 - DNA, 75 bp, synthetic construct
  source 1..75: mol_type = other DNA
aaaaacagagtattacccaatatacgttcgaaagtttatatccttaatgaaggggatattgaaaacatcaaaaag

SEQ ID NO: 884052 - DNA, 75 bp, synthetic construct
  source 1..75: mol_type = other DNA
aaaacagcgatggttaaacgctaagaaaaacaagaggacgcagaaaaatgaatatgttacggagcgtctcagcaa

SEQ ID NO: 884053 - DNA, 75 bp, synthetic construct
  source 1..75: mol_type = other DNA
cctaatacctccggtataacctaccgaatcgatcctggcattgccaaagataaatttggcaatgctggctgggat

SEQ ID NO: 884054 - DNA, 75 bp, synthetic construct
  source 1..75: mol_type = other DNA
aaatcctgtcggatgaaacacggctagccatcgtcatgcttctccgtgagtccggagaattgtgcgtctgcgata

SEQ ID NO: 884055 - DNA, 75 bp, synthetic construct
  source 1..75: mol_type = other DNA
atgttgacaagaaatatagagtcaggacgatcttttgatgactatcgtgtgttggactgggatatggacataaat

SEQ ID NO: 884056 - DNA, 75 bp, synthetic construct
  source 1..75: mol_type = other DNA
gaagagtcgttacagcagatgaagtcattgctcgtttgttaatccccgtgacagcaaatattacagccggtggaa

SEQ ID NO: 884057 - DNA, 75 bp, synthetic construct
  source 1..75: mol_type = other DNA
cgcgccaaccattggcatcaacactatcgccagcgatgacgtgattaacgccacggaaaaaggcgcggatctgca

SEQ ID NO: 884058 - DNA, 75 bp, synthetic construct
  source 1..75: mol_type = other DNA
ccgctcaccatcagcggcaccagcaccgccgaaaccgggcagacggtgaccgtcacccttaacggcgcaacctac

SEQ ID NO: 884059 - DNA, 75 bp, synthetic construct
  source 1..75: mol_type = other DNA
aaccctttccggcagcacctccggcgtggagccggggcaaacggtcaccgtcacctttggcggtaaaagctatac

SEQ ID NO: 884060 - DNA, 75 bp, synthetic construct
  source 1..75: mol_type = other DNA
gttgcagagccggtttcgtccgtgttttcccgtcgggtcgcacttacgcttgccgtacgacgggagccagcttct

SEQ ID NO: 884061 - DNA, 75 bp, synthetic construct
  source 1..75: mol_type = other DNA
aagctattttgattagaaatggtgttgaaccagtaaatataagcgaatcatctaaattatctttgaaacaaccac

SEQ ID NO: 884062 - DNA, 75 bp, synthetic construct
  source 1..75: mol_type = other DNA
gccgccgatctggcgtcattacccgagggcagcgcctccgcactggccagcgtcagcaatatcaacggcaatagc

SEQ ID NO: 884063 - DNA, 75 bp, synthetic construct
  source 1..75: mol_type = other DNA
cacggtacaggcagacggaagctggagcgtcggcattccggcggcaagcgtcagtgcatggcctgcggggccgtt

SEQ ID NO: 884064 - DNA, 75 bp, synthetic construct
  source 1..75: mol_type = other DNA
caccatcgccagcatcagcaccgacacggggagttcggcaactgactttatcaccagcgatacctcgctcacgct

SEQ ID NO: 884065 - DNA, 75 bp, synthetic construct
  source 1..75: mol_type = other DNA
gaccatcactggcagcagcacggcggaagcggggcagacggtgaccgtcaccctcaatggcgaaaactatactgg

SEQ ID NO: 884066 - DNA, 75 bp, synthetic construct
  source 1..75: mol_type = other DNA
cattacccatccgctgaccgttgatctcactaccgtcgccgtcagcatgaacagcatcaccagcgatgatgtgat

SEQ ID NO: 884067 - DNA, 75 bp, synthetic construct
  source 1..75: mol_type = other DNA
cctttctggcagcaccagcggaattgaaagcgggcaaaccgtcaccgtcacttttggtggtaaaacctacaccgc

SEQ ID NO: 884068 - DNA, 75 bp, synthetic construct
  source 1..75: mol_type = other DNA
cgcggtgcaggccgatggtagctggagcgtgggcgtcacggcggcgcaggttagcgcctggcctgcggggacggt

SEQ ID NO: 884069 - DNA, 75 bp, synthetic construct
  source 1..75: mol_type = other DNA
ctattttatttgcgaatggctttgagttcaaaaatcaaagtaatataggtgactcatatacgtttgatttaggta

SEQ ID NO: 884070 - DNA, 75 bp, synthetic construct
  source 1..75: mol_type = other DNA
cagagccgctggtcgaaagtcgctatctttacgacccgctgggccgcagggtggcaaaacgggtatggcgacgtg

SEQ ID NO: 884071 - DNA, 75 bp, synthetic construct
  source 1..75: mol_type = other DNA
ccaaagaactttgtgaatggagagacgatccagataaccctaaatttcaaaacgcaaatgttccaaaagaggtcg

SEQ ID NO: 884072 - DNA, 75 bp, synthetic construct
  source 1..75: mol_type = other DNA
cgccaaatctggcgcaggcctatgggatgaattttcgccgtctggatatcgaaggtcacagaatgctgatttcga

SEQ ID NO: 884073 - DNA, 75 bp, synthetic construct
  source 1..75: mol_type = other DNA
ccaatcccgcaggccaattgctgcttcttgatgagccgatgaacagtcttgatgttgcgcaacaaagtgcgttag

SEQ ID NO: 884074 - DNA, 75 bp, synthetic construct
  source 1..75: mol_type = other DNA
gtattccgcaccgatgatatcatcatgcatgaggtaaccaattttcgtgcctttgctacagatgataactactcc

SEQ ID NO: 884075 - DNA, 75 bp, synthetic construct
  source 1..75: mol_type = other DNA
agggttgaaaccgccaccggtgagctggcgaaaacgcagcgccgcagcctggcggatacccttcagcagtccggc

SEQ ID NO: 884076 - DNA, 75 bp, synthetic construct
  source 1..75: mol_type = other DNA
acctgaacgtgaaagaagaagatttcgcggttctggcgactaatgccctgaaagatgcctgtggttttactaacc

SEQ ID NO: 884077 - DNA, 75 bp, synthetic construct
  source 1..75: mol_type = other DNA
atgggcgtgaacgtgacaggtaaaaacgatgcggaaggtgctgaagcctgcattaacgccatccgtgaactggcg

SEQ ID NO: 884078 - DNA, 75 bp, synthetic construct
  source 1..75: mol_type = other DNA
caatatcgaccagacggtgaataccagctggggcggcttacaggccaccgatgctactcacgcttacgacctcag

SEQ ID NO: 884079 - DNA, 75 bp, synthetic construct
  source 1..75: mol_type = other DNA
tgtacagctccggcaccggaacgtggctggcgaacggcgggatggacgtggttgatttccgcctctcgacggtgg

SEQ ID NO: 884080 - DNA, 75 bp, synthetic construct
  source 1..75: mol_type = other DNA
agcagccgttaacccttaacggctcgaccagcgcggaagtggggcagacggtcaccgtcacctttggcggcaaaa

SEQ ID NO: 884081 - DNA, 75 bp, synthetic construct
  source 1..75: mol_type = other DNA
ctggcaggtaggcgtgcctgcggcagatctacaggcactgacgccgggtacgatagtggttaatgccagcgcaac

SEQ ID NO: 884082 - DNA, 75 bp, synthetic construct
  source 1..75: mol_type = other DNA
ggggacggtgaatatcacggtttcaggtgccactagcgcaggaaacccggtcactatcatccatccagtcaccgt

SEQ ID NO: 884083 - DNA, 75 bp, synthetic construct
  source 1..75: mol_type = other DNA
agcgggcgatatcatcaccgtcacgttaaacagtaaaacctacaccacgacgctggatgcctccggtaactggag

SEQ ID NO: 884084 - DNA, 75 bp, synthetic construct
  source 1..75: mol_type = other DNA
ccacgacggacgccgcaggcaactggagcaccacggtgccagcctctgccgtcggtgcgctgggcgaagccagtt

SEQ ID NO: 884085 - DNA, 75 bp, synthetic construct
  source 1..75: mol_type = other DNA
atatcaccattgatgccaacctgccggggctgcgcgtagataccgtggcgggcgatgatatcgtcaacagcatcg

SEQ ID NO: 884086 - DNA, 75 bp, synthetic construct
  source 1..75: mol_type = other DNA
ggcggcaaaacctacaccaccacggtggcggctaacggtagctggagcaccaccgttccggcggcggatatggcg

SEQ ID NO: 884087 - DNA, 75 bp, synthetic construct
  source 1..75: mol_type = other DNA
ggcacctggagcgtgaccgttcccgccgccaacgttggcgcactggctgacggcaatgctacggtcaccgccagc

SEQ ID NO: 884088 - DNA, 75 bp, synthetic construct
  source 1..75: mol_type = other DNA
gcgggggcgaccattcagatcaaagacagtaacggcaatactatcgccagcactcaggtagacagcaacgggcgc

SEQ ID NO: 884089 - DNA, 75 bp, synthetic construct
  source 1..75: mol_type = other DNA
tcagaccagcgccttcccgtggggatggttagcgggtgccgcggtaggtggtggcgcgcttggcgctttactggc

SEQ ID NO: 884090 - DNA, 75 bp, synthetic construct
  source 1..75: mol_type = other DNA
caacagcagcacccagacccacaacgtgcaggtgaacacggcggcagtgtcgctctcggttagcaccatcagcgg

SEQ ID NO: 884091 - DNA, 75 bp, synthetic construct
  source 1..75: mol_type = other DNA
tcgctggcgacgatattcttaacaccgctgaacagattgtggcgcagattatttccggtcaggtcagtggagctt

SEQ ID NO: 884092 - DNA, 75 bp, synthetic construct
  source 1..75: mol_type = other DNA
gtcgatacgattaaccccaccgccacgccgaccattgtgtcgtataccgatgatgtcgggcagcggcaggggacg

SEQ ID NO: 884093 - DNA, 75 bp, synthetic construct
  source 1..75: mol_type = other DNA
cggttaacctgaacggtaaaaactacaccaccacgctggacgcctccggtaactggagcgtgggtattccggcgg

SEQ ID NO: 884094 - DNA, 75 bp, synthetic construct
  source 1..75: mol_type = other DNA
cagatgcttccggcaactggagcgccacggtgccagcctcggcagttagcgcattgggtgaagctaactacacgg

SEQ ID NO: 884095 - DNA, 75 bp, synthetic construct
  source 1..75: mol_type = other DNA
tctcgttgctccggtcgttaccatcaacacggtagcaagcgacgacgtcattaacgccacagaacacggacaggc

SEQ ID NO: 884096 - DNA, 75 bp, synthetic construct
  source 1..75: mol_type = other DNA
agtatgtcaccagcaccgatgccagcggcaactggagcgttggcgtgcctgccagcgtgatttccggccttgcgg

SEQ ID NO: 884097 - DNA, 75 bp, synthetic construct
  source 1..75: mol_type = other DNA
tcgataaagagggcgacggttatcttgatttctggattggcgacgccggtggaccggactctaataccttcctgt

SEQ ID NO: 884098 - DNA, 75 bp, synthetic construct
  source 1..75: mol_type = other DNA
acggttactggcgctcaggcgggcgatatcgtcaccgtgacgctgaataatgtggattacaccacggtggtggat

SEQ ID NO: 884099 - DNA, 75 bp, synthetic construct
  source 1..75: mol_type = other DNA
caggcaactggaccttaaccgtgcctgtcagcgatctggcggcattaggccaggccaactataccgtcagcgcca

SEQ ID NO: 884100 - DNA, 75 bp, synthetic construct
  source 1..75: mol_type = other DNA
cttcggtaacgaacagcgtaggcaataccggtaacggcacgcgcgaaatcaccatagacgcgaatctccccggtc

SEQ ID NO: 884101 - DNA, 75 bp, synthetic construct
  source 1..75: mol_type = other DNA
ccgctgaaatcgctgtggcgcagaccatcagcggtcaggtcacgggaacagcggttgcggggaatacggtgattg

SEQ ID NO: 884102 - DNA, 75 bp, synthetic construct
  source 1..75: mol_type = other DNA
gcgtggataccgtggcgggcgatgatatcgtcaacagcatcgagcatggtcaggcactggtgatcactggtggca

SEQ ID NO: 884103 - DNA, 75 bp, synthetic construct
  source 1..75: mol_type = other DNA
cggcccgacgctgaccatcaataccgtctccgacgatgacattattaacagtacggagaaaacccaggatctgac

SEQ ID NO: 884104 - DNA, 75 bp, synthetic construct
  source 1..75: mol_type = other DNA
tatctggatatagttactattaagagaaaggatttagatacattcatggctttatccaaaacatgtcttgtttta

SEQ ID NO: 884105 - DNA, 75 bp, synthetic construct
  source 1..75: mol_type = other DNA
ggacagacccagaaccacccaccttttcaggctgtagtgacttgtgatggtgattcggaagtgaagaccgcattg

SEQ ID NO: 884106 - DNA, 75 bp, synthetic construct
  source 1..75: mol_type = other DNA
ctttctggtaaatggcgggggcgtgaatgactttctgtccacgcttgatcctgatgaggacctgttaattctgtg

SEQ ID NO: 884107 - DNA, 75 bp, synthetic construct
  source 1..75: mol_type = other DNA
aaggggttgtggcaattctgggatagcaccgcaaaacagtatggtctggtgggagatgatgtttatgacccaaat

SEQ ID NO: 884108 - DNA, 75 bp, synthetic construct
  source 1..75: mol_type = other DNA
ctgacggctggcagcactgatgccgttaacggctctcagctgaaaaccaccaacgatgctgtggcgacgaatacc

SEQ ID NO: 884109 - DNA, 75 bp, synthetic construct
  source 1..75: mol_type = other DNA
tatcaacagatatactaaagatgaagggagtcttttttatcatggtggtattaacggggaagccagttactgtaa

SEQ ID NO: 884110 - DNA, 75 bp, synthetic construct
  source 1..75: mol_type = other DNA
caccagcaaaatcaccaatatcctggacggcacagtcactgcaaccagtccgatgccattaacggtagccagctt

SEQ ID NO: 884111 - DNA, 75 bp, synthetic construct
  source 1..75: mol_type = other DNA
agccggggagcttcgcgccgctcatccgcatcgaaacagacaacggtgaacgggagaaagcgcagtgccgcagcc

SEQ ID NO: 884112 - DNA, 75 bp, synthetic construct
  source 1..75: mol_type = other DNA
ttgtgctgggagtttgaatattcaggttattatggtttattttttggcatttcgggagtgagtctggttgaaggt

SEQ ID NO: 884113 - DNA, 75 bp, synthetic construct
  source 1..75: mol_type = other DNA
tttacagcaatgagccggatgctggtcaatggtggtgaaccggagctggatctgtctgaacatctggtcagcgtg

SEQ ID NO: 884114 - DNA, 75 bp, synthetic construct
  source 1..75: mol_type = other DNA
ttatatcggaatgatggcaagcgcttattcaaattaccatgatcagttcgaaatattcaaaggttgtagctacaa

SEQ ID NO: 884115 - DNA, 75 bp, synthetic construct
  source 1..75: mol_type = other DNA
tcagcggaagatgtttcatgacaattgtaagagaatttatcgaacaatcccaccacataaattgaaagaaaagca

SEQ ID NO: 884116 - DNA, 75 bp, synthetic construct
  source 1..75: mol_type = other DNA
gttattacatcgttgatcatgaaacgggcgtgcgcaccagaccggacaacctgacagagccgggctttatcaaaa

SEQ ID NO: 884117 - DNA, 75 bp, synthetic construct
  source 1..75: mol_type = other DNA
agatccggttgacccggtaaccggcgcgtactgcgacgaacgtactgacttcaccctgggccagacactccccct

SEQ ID NO: 884118 - DNA, 75 bp, synthetic construct
  source 1..75: mol_type = other DNA
cgctggtccgataacgaccagacgtggagccgtttcacctacgatgaacagggccggtgcgtgaatgtcaccggg

SEQ ID NO: 884119 - DNA, 75 bp, synthetic construct
  source 1..75: mol_type = other DNA
aaagaatgcaacggtaatactgtggtgttttcctatgagcaatatccgcaggcaaatcatagcttcccgcttaat

SEQ ID NO: 884120 - DNA, 75 bp, synthetic construct
  source 1..75: mol_type = other DNA
ttgctgcgcaacccggcaaaacccgtctgcgaaaatcactgaaattgtggcaggtggtgatgatgggtctggcct

SEQ ID NO: 884121 - DNA, 75 bp, synthetic construct
  source 1..75: mol_type = other DNA
tgaaacggatgcagcgtattatcctgatgcactgaagaagctggaagcggcggcggatgaggctgtgcgcagggc

SEQ ID NO: 884122 - DNA, 75 bp, synthetic construct
  source 1..75: mol_type = other DNA
tatccaatgatagaggttaatggcaactgcaaaattatcggcgttgttgttgatgcgaagatactaaacatccca

SEQ ID NO: 884123 - DNA, 75 bp, synthetic construct
  source 1..75: mol_type = other DNA
ggttttgccgttgaacatccctggctttttggggccgcagtgcttgcggggccatcaagagttggtgccgtggca

SEQ ID NO: 884124 - DNA, 75 bp, synthetic construct
  source 1..75: mol_type = other DNA
ccgctgccagatatcttactgatagcatgaagcgttatggtggtgatatagcaaaagttctggcccagtataatg

SEQ ID NO: 884125 - DNA, 75 bp, synthetic construct
  source 1..75: mol_type = other DNA
agaattaaaggcggcagagagtacctattcgccttatttttccggtgttggcaatgtgctcaatacactggcagc

SEQ ID NO: 884126 - DNA, 75 bp, synthetic construct
  source 1..75: mol_type = other DNA
tgaggtggttggttttcatgccaatactgtcgaaaaaatcggggaaaacagttatcgcgtctggccgaacgagat

SEQ ID NO: 884127 - DNA, 75 bp, synthetic construct
  source 1..75: mol_type = other DNA
tttaaataccgtgcttgcgctgaatcaggttatccgctcgccacgggtgattctgacccatatcagccaccagtt

SEQ ID NO: 884128 - DNA, 75 bp, synthetic construct
  source 1..75: mol_type = other DNA
atgaataataatgctctcagaaatattgatatagataggctttcatcagttacttattttagtgcggcacataat

SEQ ID NO: 884129 - DNA, 75 bp, synthetic construct
  source 1..75: mol_type = other DNA
gactgtacagcaacatgttgatccgggcgctggaagtgacgacggacaagacaaccgaaaacgtcctgtccgccg

SEQ ID NO: 884130 - DNA, 75 bp, synthetic construct
  source 1..75: mol_type = other DNA
accaacgttaaagatggcgacctgacgactggcagcaccgatgccgttaacggctctcagctgaaaaccaccaac

SEQ ID NO: 884131 - DNA, 75 bp, synthetic construct
  source 1..75: mol_type = other DNA
gcagttatgccggtttagaaaatggcactgcaattggtgctcaagccagtgctcaggggaaaaattcagttgctc

SEQ ID NO: 884132 - DNA, 75 bp, synthetic construct
  source 1..75: mol_type = other DNA
ggtgaatattttgttagcgttgcagtaaataacaaccaaatcagtaacggacaaaaaattgactggaaaaagaac

SEQ ID NO: 884133 - DNA, 75 bp, synthetic construct
  source 1..75: mol_type = other DNA
cgagggcagcatagcgtcaggagaattccaacaattgggtgagggagagggtgatggggacgagcatgaacggct

SEQ ID NO: 884134 - DNA, 75 bp, synthetic construct
  source 1..75: mol_type = other DNA
cggacacacaatattggtatcttcaatgagtgaactactaaaaaatatggcactcaatggacttggtattgcctg

SEQ ID NO: 884135 - DNA, 75 bp, synthetic construct
  source 1..75: mol_type = other DNA
atgatactgtccggtttatcactttgggagaaaggcagtccgctgcatgaatctacgcaacaggttgaaaaccta

SEQ ID NO: 884136 - DNA, 75 bp, synthetic construct
  source 1..75: mol_type = other DNA
tctcgacgatccgcgatcctcgctccttcctgtgcactatcgccaaacgcgtgatggtggacctgtttcgccgaa

SEQ ID NO: 884137 - DNA, 75 bp, synthetic construct
  source 1..75: mol_type = other DNA
ggccgggcagaagctttttacctccattgaggtgcgggaaaactatctgggcacgggcaaattctttgtgtcagg

SEQ ID NO: 884138 - DNA, 75 bp, synthetic construct
  source 1..75: mol_type = other DNA
actgcaaagcggtacttttaataatgttggcgaagcgttaaagggtattgatgataatacattacaatgggaccc

SEQ ID NO: 884139 - DNA, 75 bp, synthetic construct
  source 1..75: mol_type = other DNA
attgctcccggtgaatattttgtcagcattgcagtaaataataaccaaatcagtaatgggcaaaaaattaactgg

SEQ ID NO: 884140 - DNA, 75 bp, synthetic construct
  source 1..75: mol_type = other DNA
agtgagctgaagctggcgaacgtgacaattactgatatgcaggtacgccagcgtgatgtcgctgcacttgatgcc

SEQ ID NO: 884141 - DNA, 75 bp, synthetic construct
  source 1..75: mol_type = other DNA
gttatctatagcagcggatccagttattacaggtaacaagggaaatatagctagtgctactgcaaaattaaagtt

SEQ ID NO: 884142 - DNA, 75 bp, synthetic construct
  source 1..75: mol_type = other DNA
ttcaaccaatattatggtgccgggagtgcagaaaaaatatatggcaataatggtgatattattggtattagaatg

SEQ ID NO: 884143 - DNA, 75 bp, synthetic construct
  source 1..75: mol_type = other DNA
ggaaagaagagaggcagtgatgaatctggtttccccgcatggattgatgtatcagaaccagcaacagagcagtta

SEQ ID NO: 884144 - DNA, 75 bp, synthetic construct
  source 1..75: mol_type = other DNA
acgtcactatgaacccggaagcagcgcagatgcttgagtcgcggtcgttcagcatcgaggaaatctgcagatggt

SEQ ID NO: 884145 - DNA, 75 bp, synthetic construct
  source 1..75: mol_type = other DNA
tttggccttgatggtgtctgcggcatgatgccaatgatgacaggtcgtgacgtgatcggcgcggcgatggccgtc

SEQ ID NO: 884146 - DNA, 75 bp, synthetic construct
  source 1..75: mol_type = other DNA
ctccggggtgaaaacgccagttcaaaaaaatgaatcaatattgagccggttaagtggctttgtagcaggagggta

SEQ ID NO: 884147 - DNA, 75 bp, synthetic construct
  source 1..75: mol_type = other DNA
acgaaatcggttacatcggtgaatgattcgctcttggggcaggtcacgggtgcgagtaaggttggcggacgttat

SEQ ID NO: 884148 - DNA, 75 bp, synthetic construct
  source 1..75: mol_type = other DNA
taccatcgcatctgatgacctgtggatcgagagtttagcgatccaacaattacacaccacggcaaatttacccaa

SEQ ID NO: 884149 - DNA, 75 bp, synthetic construct
  source 1..75: mol_type = other DNA
aaccgtcggaagcggcaaaggcctcatcgtttccaacggtgcattgaatatcgacatggaccccaattttggtgg

SEQ ID NO: 884150 - DNA, 75 bp, synthetic construct
  source 1..75: mol_type = other DNA
ccggtggtacgcacctcagtgactactatcgcactggtgatggcaagtactcatggcgcttgggctgttacctgc

SEQ ID NO: 884151 - DNA, 75 bp, synthetic construct
  source 1..75: mol_type = other DNA
gtgcagaaaaaatatatggcaataatggtgatattattggtattagaatggataaaataaatggagaatcgcttt

SEQ ID NO: 884152 - DNA, 75 bp, synthetic construct
  source 1..75: mol_type = other DNA
gacacaaagtggattgagtcggcgctggagaacgggcgttacccgctcacggctgcgccggaagaccatgctgac

SEQ ID NO: 884153 - DNA, 75 bp, synthetic construct
  source 1..75: mol_type = other DNA
ttctcacaagatcttttagcccgtcgcctgggggccacagatcgaaccgtccgcaacctgttgcgcgatatgttg

SEQ ID NO: 884154 - DNA, 75 bp, synthetic construct
  source 1..75: mol_type = other DNA
catcatcaagtaccggaactcaacaacagccagttcgttgaagctaacactcgacaacggcagcaccatgacggg

SEQ ID NO: 884155 - DNA, 75 bp, synthetic construct
  source 1..75: mol_type = other DNA
tcagaaagtcacaggcaataaggcaaagcatattcttgaggatatagaaatattctatcgtaacaaacccgatac

SEQ ID NO: 884156 - DNA, 75 bp, synthetic construct
  source 1..75: mol_type = other DNA
caaagaggctcgtggtggagattacagatcaacgaattacttcccgccagcctggatgcagcaaaagcccatgga

SEQ ID NO: 884157 - DNA, 75 bp, synthetic construct
  source 1..75: mol_type = other DNA
caatattcagtttccaccaaattttgatgagtcaaaacagtatccggcgattatcagcgtccatccttttggcag

SEQ ID NO: 884158 - DNA, 75 bp, synthetic construct
  source 1..75: mol_type = other DNA
tacctttatgtccctgtgtcagggaaaaaggtatggcagcttcgctacaagattgacggtaaggagaaaatcctg

SEQ ID NO: 884159 - DNA, 75 bp, synthetic construct
  source 1..75: mol_type = other DNA
gcaccagatcggtatacaaccatgccgcctatctcgatacccgtcgtgagatgatgcagtggtgggcagactggc

SEQ ID NO: 884160 - DNA, 75 bp, synthetic construct
  source 1..75: mol_type = other DNA
acaaaatgcgaagagcattgaggagaagaatattgaaaaaaacaagaaacaaacaaattctgaggataattttgt

SEQ ID NO: 884161 - DNA, 75 bp, synthetic construct
  source 1..75: mol_type = other DNA
gccggtatagattttcctccatcgctgacgggcaatcagtataccgatttcctgatgaaagtcgtgtttgattat

SEQ ID NO: 884162 - DNA, 75 bp, synthetic construct
  source 1..75: mol_type = other DNA
aggggcgcgtcgctgcgcttctggagcttggcatgggcttccatcctgattttactggtcggcagaacgtatata

SEQ ID NO: 884163 - DNA, 75 bp, synthetic construct
  source 1..75: mol_type = other DNA
gacagacgttacgactccattattttacatgtgaccaagagcatggatttctggggtgtcatcgatcttaagtcg

SEQ ID NO: 884164 - DNA, 75 bp, synthetic construct
  source 1..75: mol_type = other DNA
ctgtgcacaggacgttgccgcggtaacaggcgcaaccgtaatgatcttacccagcaatagtggacacgcggctaa

SEQ ID NO: 884165 - DNA, 75 bp, synthetic construct
  source 1..75: mol_type = other DNA
aaagctaccaatgacgatgtcgaagccaataccgccaatatcgctactaataccagcaacattgccacgaatacg

SEQ ID NO: 884166 - DNA, 75 bp, synthetic construct
  source 1..75: mol_type = other DNA
atatgctttcttttggtgtttctgcaggtaatccgcaaagtgaaatgatccctttagatcgccgctatgattcag

SEQ ID NO: 884167 - DNA, 75 bp, synthetic construct
  source 1..75: mol_type = other DNA
tttacaaccatgctcagtatctcgataaacgcagagaaatgatgcaatggtgggcggactggattgatgggaagg

SEQ ID NO: 884168 - DNA, 75 bp, synthetic construct
  source 1..75: mol_type = other DNA
acaacgaatacaccggtaacggcgttacgacatcattcccttatacctttagggttttcaataaatctgatttag

SEQ ID NO: 884169 - DNA, 75 bp, synthetic construct
  source 1..75: mol_type = other DNA
ataacggaacatcgatcacgttgcgaaatttatcgtcgtcccaagaacaaacaggtgccagatgggctattgata

SEQ ID NO: 884170 - DNA, 75 bp, synthetic construct
  source 1..75: mol_type = other DNA
ttctgattatggtatatatgtgttcaagtatactggggaattagttgatttttggagcgttgaatatggagaaga

SEQ ID NO: 884171 - DNA, 75 bp, synthetic construct
  source 1..75: mol_type = other DNA
gtgctcaggggaaaaattcagttgctctgggtgctgattctgtcgcgactgaagcggatactgtctccgtgggta

SEQ ID NO: 884172 - DNA, 75 bp, synthetic construct
  source 1..75: mol_type = other DNA
tagaaaccagggtaagttttttgctgaggtgcacgaggacgcgtttgataagctaacgatgctgatccagcaggt

SEQ ID NO: 884173 - DNA, 75 bp, synthetic construct
  source 1..75: mol_type = other DNA
actgattacacagtcactggtgcgggagggtataacggtggcaatgtaattctgtcgaaggcactggctaatggt

SEQ ID NO: 884174 - DNA, 75 bp, synthetic construct
  source 1..75: mol_type = other DNA
tgatgctgccatgtctggtaactcttacaatggcggacaagggaaagcgggaattgtatatattgaggaatattc

SEQ ID NO: 884175 - DNA, 75 bp, synthetic construct
  source 1..75: mol_type = other DNA
tcaattttgcgagaaaaaaactacagaaaaattgctgaaacactatataaaactggggtcataactatggcaaca

SEQ ID NO: 884176 - DNA, 75 bp, synthetic construct
  source 1..75: mol_type = other DNA
aacttggtcatgcactcatcttttccactaagagctggaagggttttctttcactacccttaagattgctagctt

SEQ ID NO: 884177 - DNA, 75 bp, synthetic construct
  source 1..75: mol_type = other DNA
ttatgatgcgtatggagtgcaacaattttactacccaaacattctgaaatatgaccctgatcaattagagttgag

SEQ ID NO: 884178 - DNA, 75 bp, synthetic construct
  source 1..75: mol_type = other DNA
tgacaactcatacggccaagtcacgttacccctaaaacacgccagttctgctgcatggcgtaaatcagatggaag

SEQ ID NO: 884179 - DNA, 75 bp, synthetic construct
  source 1..75: mol_type = other DNA
tccccggcaatggcggatcatcatattggggcggcggtggtcgtgggggcgcacgcgggggcgtggcaggggatt

SEQ ID NO: 884180 - DNA, 75 bp, synthetic construct
  source 1..75: mol_type = other DNA
taccatgaaacctgcttctgctgtaaatggaggaatacaagaaattaaattcagcgtttcattgactatggagcc

SEQ ID NO: 884181 - DNA, 75 bp, synthetic construct
  source 1..75: mol_type = other DNA
aacgggctggatctgccaccggagccgcaggcgtgggagctactgccggatccggaatgtctgctccatccgctg

SEQ ID NO: 884182 - DNA, 75 bp, synthetic construct
  source 1..75: mol_type = other DNA
atggacaacaaaatatcaacctattcaccggcctttagtattgtgtcatggatagctctcgttggtggtatcgtt

SEQ ID NO: 884183 - DNA, 75 bp, synthetic construct
  source 1..75: mol_type = other DNA
tagggaaggctattgtggaccagacagtgaaggcgaactggcttgaggttttcgatgcaatggggaggagtgtca

SEQ ID NO: 884184 - DNA, 75 bp, synthetic construct
  source 1..75: mol_type = other DNA
atgctaggtaatgaaacgcatagttccgcaaagctaggaatgacaaagaagaacaaaacaaacgatttgtgtata

SEQ ID NO: 884185 - DNA, 75 bp, synthetic construct
  source 1..75: mol_type = other DNA
ctctttgttacgtgttaaaaccaggaaggaaatcccaagcagaaagaacaccgccactgtcttggtcgatatagc

SEQ ID NO: 884186 - DNA, 75 bp, synthetic construct
  source 1..75: mol_type = other DNA
tgatgcgccagtgcgcaccggggtcgaagtgcatcaagttgtgcggttgctcggacgtagcggattcaaagtagt

SEQ ID NO: 884187 - DNA, 75 bp, synthetic construct
  source 1..75: mol_type = other DNA
gttcctcggtttcgatgcggtgacgacgctttcggaagaaacgccggacgccgcgcgcgtgatcccgaaagctat

SEQ ID NO: 884188 - DNA, 75 bp, synthetic construct
  source 1..75: mol_type = other DNA
aaggtgaaggcgtcggcaccgtctggtcgctacaaccgtttattagcgagaacgcgcatctgattccgattatta

SEQ ID NO: 884189 - DNA, 75 bp, synthetic construct
  source 1..75: mol_type = other DNA
acgctttcggaagagacgccggacgccgcacgcgtgatcccgaaagccatcttcctgacggcggtatacggcggc

SEQ ID NO: 884190 - DNA, 75 bp, synthetic construct
  source 1..75: mol_type = other DNA
cagttaagcattggtgactatccaactatttcactctctcaggcgagagacagaagacagcagttcagagcgtgg

SEQ ID NO: 884191 - DNA, 75 bp, synthetic construct
  source 1..75: mol_type = other DNA
ggaggccaatggacttaatagtatcgcgttgggctctgggggtattgcagatgccgataacacgattgctctggg

SEQ ID NO: 884192 - DNA, 75 bp, synthetic construct
  source 1..75: mol_type = other DNA
tgaattatagtggctttgtcggtaatgactccaacttattgatagtgttttatgttcagataatgcccgatgact

SEQ ID NO: 884193 - DNA, 75 bp, synthetic construct
  source 1..75: mol_type = other DNA
ggaacgctttgtttccaaaatgtttggaataaggcgcacacatgatgatatatcgagtaatattgtgcctcttta

SEQ ID NO: 884194 - DNA, 75 bp, synthetic construct
  source 1..75: mol_type = other DNA
gatgacggagccttgggtgaaatttggacgcaactttcagaagctttaagtggcgcgcccgggaaggccctggcc

SEQ ID NO: 884195 - DNA, 75 bp, synthetic construct
  source 1..75: mol_type = other DNA
atggaactttctttaaatattggccttagtgaaaagaaatctaacacggctgcactttttaaaacaaaaagcgca

SEQ ID NO: 884196 - DNA, 75 bp, synthetic construct
  source 1..75: mol_type = other DNA
attttatatgcgtaccgatatggctaatcatcagagcgatcagctcaacgtcatcggtcaggcaacaggtgattt

SEQ ID NO: 884197 - DNA, 75 bp, synthetic construct
  source 1..75: mol_type = other DNA
gccggcattattttcagtggtatcggtctgataatcagggtcccctctgccaaaaagtcacgcaggaaacggaag

SEQ ID NO: 884198 - DNA, 75 bp, synthetic construct
  source 1..75: mol_type = other DNA
agcgggcatttcaacattccctacggtaattataaaaatccgtattttcctgaaaaagaaattcgtacatttgca

SEQ ID NO: 884199 - DNA, 75 bp, synthetic construct
  source 1..75: mol_type = other DNA
atccgttcgctgtatcgcaattttactcaccactacatcaaggcaaaacgcaacatcggtgtggcagctggagag

SEQ ID NO: 884200 - DNA, 75 bp, synthetic construct
  source 1..75: mol_type = other DNA
aactggctatatgcatcttaattctagagggtacacgagagttgaaccaggtgatgaacttttgcgccacgaaga

SEQ ID NO: 884201 - DNA, 75 bp, synthetic construct
  source 1..75: mol_type = other DNA
tttctagcgccttattggttcctaggctatctttcattaaagaatttccacgaatacgaggtaagcaattcgatt

SEQ ID NO: 884202 - DNA, 75 bp, synthetic construct
  source 1..75: mol_type = other DNA
cgaatgatattgagcgagtggcagaagattgtcgccgtgcctggaatttaggtcttggccctatatcatcaatgg

SEQ ID NO: 884203 - DNA, 75 bp, synthetic construct
  source 1..75: mol_type = other DNA
aagcgtgcggcggaggacttacaggcgaaatataaccgcctgacagattccgttaaacgccagcagcgggaactg

SEQ ID NO: 884204 - DNA, 75 bp, synthetic construct
  source 1..75: mol_type = other DNA
atggtgcaattatttgcatgtattctgttattttcgttgttcatgtcagaaattatatttaatgataatataact

SEQ ID NO: 884205 - DNA, 75 bp, synthetic construct
  source 1..75: mol_type = other DNA
aaaggatatacgaaagttgaaccaggagatgaatttattcgcccggaagaaccgagtatgttagctgaggcgatt

SEQ ID NO: 884206 - DNA, 75 bp, synthetic construct
  source 1..75: mol_type = other DNA
atcaggtggcactggagaacgtgctgtcggctgagtacgaagtggatggtattttccgtaaagtcgccttcagcg

SEQ ID NO: 884207 - DNA, 75 bp, synthetic construct
  source 1..75: mol_type = other DNA
gaaaatctctgatgctaaattggcgattctcttaggtgtccctgcgattatcgccattggtacagggctgtacaa

SEQ ID NO: 884208 - DNA, 75 bp, synthetic construct
  source 1..75: mol_type = other DNA
tctgcgcaaaaaaaatgaaggaaattgctacaaaaaaatacacgtgggataccatagccaaaatgtatgaagaac

SEQ ID NO: 884209 - DNA, 75 bp, synthetic construct
  source 1..75: mol_type = other DNA
ggtattgcttggtgttccagcaatcatcgctgcaggaacaggtctttataagctatcaatgtacttttttcttta

SEQ ID NO: 884210 - DNA, 75 bp, synthetic construct
  source 1..75: mol_type = other DNA
tcgaaaacggaaagaaaccagagttgttaattaaaagggtcatagagctatctacaaaggcaggcgatttaatct

SEQ ID NO: 884211 - DNA, 75 bp, synthetic construct
  source 1..75: mol_type = other DNA
ggccgagttctaaaagaactagaagaaataaataatggcattgttagcgtagagtacacaccattaaaagggaaa

SEQ ID NO: 884212 - DNA, 75 bp, synthetic construct
  source 1..75: mol_type = other DNA
ccgcaacggctcttgttgcactggtcttcagtattcttaccggaagcgctttaggcattatcgggtatggtttac

SEQ ID NO: 884213 - DNA, 75 bp, synthetic construct
  source 1..75: mol_type = other DNA
gatctatcaactgattaaccagttcaaagccgatggcttgagtatcattctggtgtcatcggagatgccagaagt

SEQ ID NO: 884214 - DNA, 75 bp, synthetic construct
  source 1..75: mol_type = other DNA
ggaaatgaccatccataacatgcgcatcaaccatgctgcagtttcagctacccactgccgcgactgcggggaaga

SEQ ID NO: 884215 - DNA, 75 bp, synthetic construct
  source 1..75: mol_type = other DNA
gggggagatcatgctactaatcttagtacaccgatagacgatgatcaaaaaaaagatggttattatttggggctt

SEQ ID NO: 884216 - DNA, 75 bp, synthetic construct
  source 1..75: mol_type = other DNA
aaaaactatcttactgaaagtgaatggattttattaattaaacacctgcgttttatacgtgattttattgttcat

SEQ ID NO: 884217 - DNA, 75 bp, synthetic construct
  source 1..75: mol_type = other DNA
agcactggtaaaattaacgcccagagggataggctgcggaggcttatacgctaacgccgctggttttgctaataa

SEQ ID NO: 884218 - DNA, 75 bp, synthetic construct
  source 1..75: mol_type = other DNA
caagagcagcatggcaggaattaaagaggatacccggaaaatatcttctgattctactgacgccaaaagagacac

SEQ ID NO: 884219 - DNA, 75 bp, synthetic construct
  source 1..75: mol_type = other DNA
aacgggttatagctaccgcgctaacggtaatgactccaacttattgatagtgttttatgttcagataatgcccga

SEQ ID NO: 884220 - DNA, 75 bp, synthetic construct
  source 1..75: mol_type = other DNA
cgtttattacggcaaatctgccgcctgatgccatgcagatgttttccagcgcgatggaagattgcgagctggcac

SEQ ID NO: 884221 - DNA, 75 bp, synthetic construct
  source 1..75: mol_type = other DNA
tgaaaccgagctgatttacgtcaagaaaggggtagcaaggtttaccatcgattcttcgttatatgtcgcacatgc

SEQ ID NO: 884222 - DNA, 75 bp, synthetic construct
  source 1..75: mol_type = other DNA
tgattgtgaaaactacataaaaagtcagataaaaatattatctcgtcaagtgatgaaaaaaaaacctggcggaga

SEQ ID NO: 884223 - DNA, 75 bp, synthetic construct
  source 1..75: mol_type = other DNA
tccggaaaagagtcagcaggctattcagcagatgcaaattgagcatattcttcctcagacggtacgaaacgcccc

SEQ ID NO: 884224 - DNA, 75 bp, synthetic construct
  source 1..75: mol_type = other DNA
tatgaaggtcattttgcatttgacttgttatataacaataccagtgaaatacaaccaaagtcattagcgactgac

SEQ ID NO: 884225 - DNA, 75 bp, synthetic construct
  source 1..75: mol_type = other DNA
tatcaccgtcattggaacatcgtgctcaatatagtttaggtgatccagaatatcgtttttttgatttatatatgt

SEQ ID NO: 884226 - DNA, 75 bp, synthetic construct
  source 1..75: mol_type = other DNA
ttgagcttgataaggctaaaaatgattatttattgattgacgaacgtagaagaactatagaaaataaatttttaa

SEQ ID NO: 884227 - DNA, 75 bp, synthetic construct
  source 1..75: mol_type = other DNA
aagtataaatagggaagttataattatcttcttgatctactttattctggtcgggttgggtatttccggtgtaat

SEQ ID NO: 884228 - DNA, 75 bp, synthetic construct
  source 1..75: mol_type = other DNA
tctgatggttatgattgctttattttttatcgatactgttgcatttatttttatgcagttgtatttcatttatga

SEQ ID NO: 884229 - DNA, 75 bp, synthetic construct
  source 1..75: mol_type = other DNA
atggaaaaagactatttgggaattagtagtactgtattagtgagcttattgtttgggcttgcattggttttggtt

SEQ ID NO: 884230 - DNA, 75 bp, synthetic construct
  source 1..75: mol_type = other DNA
gtgttattattccgttatataatgcgggcgatgatttccgcacttgtatggaatctttaattacgcaaacctgga

SEQ ID NO: 884231 - DNA, 75 bp, synthetic construct
  source 1..75: mol_type = other DNA
agtcaccggtcggcacgtttacggcagacaaattgcgcgtgaccgatatcactagcggtgcgacatatccggtgc

SEQ ID NO: 884232 - DNA, 75 bp, synthetic construct
  source 1..75: mol_type = other DNA
gccgcgcactaaccaaagcaggggttgaaattggcgcaaccccttcatctgttggtaagtggcttgcagacgttg

SEQ ID NO: 884233 - DNA, 75 bp, synthetic construct
  source 1..75: mol_type = other DNA
tgataagggaaaaagaaaaggagcaatccatatggtgagtgcattctcgaccgaaaatggtattgtactggggta

SEQ ID NO: 884234 - DNA, 75 bp, synthetic construct
  source 1..75: mol_type = other DNA
agatggatgaattaatagatgatttaggtagagctatacctccttatcggcaggacatttaccttaagattattg

SEQ ID NO: 884235 - DNA, 75 bp, synthetic construct
  source 1..75: mol_type = other DNA
ctgttgatattgatgattattatgattttttaagggcggaagtattctgtaatgaagataaaaggtcttttttat

SEQ ID NO: 884236 - DNA, 75 bp, synthetic construct
  source 1..75: mol_type = other DNA
tcctgaaattgttaatcctcaggacggcacaccacttgccgatggcgaacatggcgaactgttattcaccacgtt

SEQ ID NO: 884237 - DNA, 75 bp, synthetic construct
  source 1..75: mol_type = other DNA
aatgctgatggtaaggattatgaatacaatctctattcctacgcgctgcaactctatccgaaaagcccaagtgcc

SEQ ID NO: 884238 - DNA, 75 bp, synthetic construct
  source 1..75: mol_type = other DNA
caggcagtttgaccgcaccacagtcttgtcagataaatgcaggacaggtgatttattttgattttgatactattc

SEQ ID NO: 884239 - DNA, 75 bp, synthetic construct
  source 1..75: mol_type = other DNA
ttcatttcgtattaaacgttcaataaatggaacggtagtaatacctatcaccgatattgcattgctgtatgccaa

SEQ ID NO: 884240 - DNA, 75 bp, synthetic construct
  source 1..75: mol_type = other DNA
gcataattctctttcatttagggttgccgtgcgggtatgcggcaaatgatggcacgtgtgcaacaagaggcggca

SEQ ID NO: 884241 - DNA, 75 bp, synthetic construct
  source 1..75: mol_type = other DNA
caaaacattcttcagagcattaagtccttacgattacacactgtattgcaggaagtgggtaaaacccaatctgac

SEQ ID NO: 884242 - DNA, 72 bp, synthetic construct
  source 1..72: mol_type = other DNA
gtgggcctggcggcagaagtgttcgaaggtagcattaccgacctgccgaacccgaaagcgaagaagaagtaa

SEQ ID NO: 884243 - DNA, 75 bp, synthetic construct
  source 1..75: mol_type = other DNA
ccaatagtatttttgataatttagtaaaggttttgagtagtacaataagctcatgtacagatacagataaacttt

SEQ ID NO: 884244 - DNA, 75 bp, synthetic construct
  source 1..75: mol_type = other DNA
aaaagaggcgctatttgatatgtgtcaggagttaatggcggtcgctaaagcgcccacggcagacagtatttcagc

SEQ ID NO: 884245 - DNA, 75 bp, synthetic construct
  source 1..75: mol_type = other DNA
cgtgggactatctgggaagcgcgacctcatttacaacaggcatgatggctcccggtcgtggtgtccttgcgaaca

SEQ ID NO: 884246 - DNA, 75 bp, synthetic construct
  source 1..75: mol_type = other DNA
accttacctactcgatctttctagccagtctggaaaaaaaaatagaattaaattacacatgcaaaataaaagatg

SEQ ID NO: 884247 - DNA, 75 bp, synthetic construct
  source 1..75: mol_type = other DNA
gtaatgagaacaaaaactgggactggaaaagcagtgccagtgcaggcattactggtatgcttgcaccgggaagaa

SEQ ID NO: 884248 - DNA, 75 bp, synthetic construct
  source 1..75: mol_type = other DNA
actttgtgccgttcatgaccgatgagaacggagcaaatgtcccgacgaacaaaccggaagaagacccggatattc

SEQ ID NO: 884249 - DNA, 75 bp, synthetic construct
  source 1..75: mol_type = other DNA
aaatccactgcaacagggggaagtaatttatggcgaaatttattttgcctacgccaactggataggcacaaacca

SEQ ID NO: 884250 - DNA, 75 bp, synthetic construct
  source 1..75: mol_type = other DNA
tagcccctaccgacgatcagaaagaatggattgagcgggcgaaatttgtttttgattatcaacaaaaacaatatg

SEQ ID NO: 884251 - DNA, 75 bp, synthetic construct
  source 1..75: mol_type = other DNA
ccgaacagataagaaatatgagaataaagaagaggcaagggttattacaataattgaatcgcgtgcggcgaaaac

SEQ ID NO: 884252 - DNA, 75 bp, synthetic construct
  source 1..75: mol_type = other DNA
aggtgaatggaatctgtataaatatccattaaaccctgttcggtttatagattctttgggtttaaaattccatgt

SEQ ID NO: 884253 - DNA, 75 bp, synthetic construct
  source 1..75: mol_type = other DNA
gtgctggcaacctgtaccgcgtgggtgaacacggtaagcctgagatattcaaggcgaacaatggcagccagtaca

SEQ ID NO: 884254 - DNA, 75 bp, synthetic construct
  source 1..75: mol_type = other DNA
gtcttaccggaaacagcactgcatcagtagcagtgggagcacagagcgggaagaatgctgttgagaataatgcgc

SEQ ID NO: 884255 - DNA, 75 bp, synthetic construct
  source 1..75: mol_type = other DNA
cggaatgctgtatcctggcgtgaagcaatctgacctcagtgaagagcagaagcagacgataagtacgctggcaac

SEQ ID NO: 884256 - DNA, 75 bp, synthetic construct
  source 1..75: mol_type = other DNA
ctgcacgacgccatcagtcgcaccatcaaagcaacgggcatggtcagcgccccggcgaacaaacgcatgttctat

SEQ ID NO: 884257 - DNA, 75 bp, synthetic construct
  source 1..75: mol_type = other DNA
tgaggtgccgcctgtggaggccgatcttaagctcattgccgcaattgacgcaggcaaatatcttgctgaggagtt

SEQ ID NO: 884258 - DNA, 75 bp, synthetic construct
  source 1..75: mol_type = other DNA
gaaggcacgattgtgctgcgcgatgagccggggctgcctctgctctcccgacttaaaaaaggagaactttggggc

SEQ ID NO: 884259 - DNA, 75 bp, synthetic construct
  source 1..75: mol_type = other DNA
gatattgaacccagtgccgatacgataaaagaattgcatgagctacttgcgaagctcaatgcgggtctggcgatc

SEQ ID NO: 884260 - DNA, 75 bp, synthetic construct
  source 1..75: mol_type = other DNA
ttcctagggggacgtgatggagccaacacgcttggcagcatggcaaattctgttaaagaaatatttattggagga

SEQ ID NO: 884261 - DNA, 75 bp, synthetic construct
  source 1..75: mol_type = other DNA
tataccctcaaaccctaccttgatcggtgggagtacagcattgagcgctggctggtcaaagagtcagaacagggc

SEQ ID NO: 884262 - DNA, 75 bp, synthetic construct
  source 1..75: mol_type = other DNA
tggaccgcaacagcgcgggtgacgtgatcagccttctcccgcttcagtctgccaatatggatgtgaaactcgtcg

SEQ ID NO: 884263 - DNA, 75 bp, synthetic construct
  source 1..75: mol_type = other DNA
cactgattggtcgtcacaccattatggtggctaacctggcaccacgtaaaatgcgcttcggtatctctgaaggca

SEQ ID NO: 884264 - DNA, 75 bp, synthetic construct
  source 1..75: mol_type = other DNA
cactacctttaccttgttgagcaaatagcagagctggaatcagaattaagtcagtcaatcaacgctgatgatacc

SEQ ID NO: 884265 - DNA, 75 bp, synthetic construct
  source 1..75: mol_type = other DNA
aagtctaaaagctgcatgtaaaagatatcgtttagttaaagaaggatggtataaaaaagaggttgtgaaacttct

SEQ ID NO: 884266 - DNA, 75 bp, synthetic construct
  source 1..75: mol_type = other DNA
aaggcaacagggtgacaaaaaagcaggtgcgccggtactggataacccgcgtcttgatgcaatcctggctgctgc

SEQ ID NO: 884267 - DNA, 75 bp, synthetic construct
  source 1..75: mol_type = other DNA
gccacattacgtcatgagtgcaaccgcagagatcgggcgtgttgctgcaggtgcggtagctgagccgcatcatga

SEQ ID NO: 884268 - DNA, 75 bp, synthetic construct
  source 1..75: mol_type = other DNA
actctgttcctctgaaaggcaaggggaatgtcgataagacgtatgttctcagatgtagatgcggatatttatcta

SEQ ID NO: 884269 - DNA, 75 bp, synthetic construct
  source 1..75: mol_type = other DNA
agattattttggcgaaaatctggatgagtttacacgggattacttttcgcccgagttagacagttttacaaaatc

SEQ ID NO: 884270 - DNA, 75 bp, synthetic construct
  source 1..75: mol_type = other DNA
ttgaaccaaacactcattccggtttcctgagtcgtttgcacgaaggggataatactcttcgctttcatgcgcgat

SEQ ID NO: 884271 - DNA, 75 bp, synthetic construct
  source 1..75: mol_type = other DNA
tacaaaaataaatggaataaagggaaacttttccgtactgattgtcttatttaaagcgtgtttgggattttataa

SEQ ID NO: 884272 - DNA, 75 bp, synthetic construct
  source 1..75: mol_type = other DNA
aggtaagctaagcgcacagctaagatgtgcctacgcttttgctcttgagcaaggttatgaaggcattgtgactat

SEQ ID NO: 884273 - DNA, 75 bp, synthetic construct
  source 1..75: mol_type = other DNA
acagatgccacagaggtctataacgcggaagaatacactgccatgctctggccatatcatgctgaccctggctgg

SEQ ID NO: 884274 - DNA, 75 bp, synthetic construct
  source 1..75: mol_type = other DNA
gctacagcctccattctgccgtcagtggcaatgctgatgagtatcaccgctctgattattgctgtgtccctcggt

SEQ ID NO: 884275 - DNA, 75 bp, synthetic construct
  source 1..75: mol_type = other DNA
ttgaacgaattggccttaatagcagtgcatttcccgagttagcccagcagcaaaacaataaatgcatcaatttac

SEQ ID NO: 884276 - DNA, 75 bp, synthetic construct
  source 1..75: mol_type = other DNA
agaaataaatatggtaaagacaaagttaacttcttctacccaccgacatccctaaatttaatgatgataaagaaa

SEQ ID NO: 884277 - DNA, 75 bp, synthetic construct
  source 1..75: mol_type = other DNA
tgaaggggaattagacgatttcacacgtcaatacttcgatggggaattggacgatttcacgcgccagtacttcga

SEQ ID NO: 884278 - DNA, 75 bp, synthetic construct
  source 1..75: mol_type = other DNA
accttgccgccgagattatccgaagcaatcagccgctgattaacagaatcgtcatggctgaagtcgataaaatta

SEQ ID NO: 884279 - DNA, 75 bp, synthetic construct
  source 1..75: mol_type = other DNA
aaaaaaccactcgatgacgtgaaagttcgccaggctctgacctacgcggtgaacaaagacgcgatcatcaaagcg

SEQ ID NO: 884280 - DNA, 75 bp, synthetic construct
  source 1..75: mol_type = other DNA
agtatccctaaagacgctatttcagcagttactccattgggaataactacagaaattgacttaaaacattatcaa

SEQ ID NO: 884281 - DNA, 75 bp, synthetic construct
  source 1..75: mol_type = other DNA
gcaattatcgcggattttctacgttcaggtggtatagaaaaactaacttcaaatgctatcaaaaatttagaaata

SEQ ID NO: 884282 - DNA, 75 bp, synthetic construct
  source 1..75: mol_type = other DNA
acccggcctgtggcacctcacgcaacacgctggagatgcttcataacaacggcaacgaaccgacaataattaatt

SEQ ID NO: 884283 - DNA, 75 bp, synthetic construct
  source 1..75: mol_type = other DNA
tcttgtagttcagaatttgtaaaaaaagcatggccatttgaaaaatacttattttccgaaaaaatcccacatttc

SEQ ID NO: 884284 - DNA, 75 bp, synthetic construct
  source 1..75: mol_type = other DNA
atgacggaagcacagcgtatttatgaaatgatacgcatgagcaggagtaaaagttcgcttctccatgccgcagta

SEQ ID NO: 884285 - DNA, 75 bp, synthetic construct
  source 1..75: mol_type = other DNA
ggagcgaagacggtcacggtgtggtgttcccggctgaactggtgtggctgctggacagtctggaggttgaaatcc

SEQ ID NO: 884286 - DNA, 75 bp, synthetic construct
  source 1..75: mol_type = other DNA
cccttctgattcagcacctgaatcacgtgcagagctaactggttcatcaataatctctacttctggcgatgattc

SEQ ID NO: 884287 - DNA, 75 bp, synthetic construct
  source 1..75: mol_type = other DNA
ctaatcgagacatccgatatagatattgataccggagtaaaaattggcaaaaatggatatgctatctccgtgcaa

SEQ ID NO: 884288 - DNA, 75 bp, synthetic construct
  source 1..75: mol_type = other DNA
gtcggttatctctcgtataacgtgcagaaaaaaccactcgatgacgtgaaagttcgccaggctctgacctacgcg

SEQ ID NO: 884289 - DNA, 75 bp, synthetic construct
  source 1..75: mol_type = other DNA
acggctgaactttcgtccattccaggcacccccatcgaggctggccccttcgatacagtggtgctttttaagatt

SEQ ID NO: 884290 - DNA, 75 bp, synthetic construct
  source 1..75: mol_type = other DNA
acgatcaatgcaccgacggatttaaagtcagttcctccttttataccgaagaaacgttggttgaagaagataaag

SEQ ID NO: 884291 - DNA, 75 bp, synthetic construct
  source 1..75: mol_type = other DNA
gctcggtttttgccgattggcaccaactttctatttgttaccatttttcgccagtgggaatataccaacagtagt

SEQ ID NO: 884292 - DNA, 75 bp, synthetic construct
  source 1..75: mol_type = other DNA
aagagtagaagatggtgctgattatgcagccagccttggttaccaggcattagccgcaggaaagtatagtctggc

SEQ ID NO: 884293 - DNA, 75 bp, synthetic construct
  source 1..75: mol_type = other DNA
atgagtactgacaagggattgttgctcatcatctgtctgttatttctgccgttgaagtctgcgctggcgctgaac

SEQ ID NO: 884294 - DNA, 75 bp, synthetic construct
  source 1..75: mol_type = other DNA
gaaacattgattgaagaggataaagcactgctgattggtaatggactgaagctacgtttgctggatgaaaattct

SEQ ID NO: 884295 - DNA, 75 bp, synthetic construct
  source 1..75: mol_type = other DNA
ggtggaaaaatcacgcttggctctggaagctcaattacaacaagcggtgattactctcatggattgtgggcaagt

SEQ ID NO: 884296 - DNA, 75 bp, synthetic construct
  source 1..75: mol_type = other DNA
ggaagatgtggcgatcctttgtcatctggatcccaaaattccttatcagcatccgtcgctcatgaatgccagtca

SEQ ID NO: 884297 - DNA, 75 bp, synthetic construct
  source 1..75: mol_type = other DNA
tctgaccatacccggaaagacggaacacgcattgaaacggaaggcgacggaaacgtgcaaacgcgacttggggtg

SEQ ID NO: 884298 - DNA, 75 bp, synthetic construct
  source 1..75: mol_type = other DNA
gcatctaaagatatttatcatgaatttgttagcggcaaaatagacagtgacgataagttcgaaactcatcgctag

SEQ ID NO: 884299 - DNA, 75 bp, synthetic construct
  source 1..75: mol_type = other DNA
cgaacccggcatttatagccagccaaatggggcatgaaactgcgcagatggtgtatgaaatttacggtatgtgga

SEQ ID NO: 884300 - DNA, 75 bp, synthetic construct
  source 1..75: mol_type = other DNA
ggatccggacggtaacactactgcagcctgctcttgaagcactgaaggagcaatacaaactgaccgggcatcatc

SEQ ID NO: 884301 - DNA, 75 bp, synthetic construct
  source 1..75: mol_type = other DNA
gctgcggataaagaaatgaccattggtgcaatataccttgatacccagggatattacgctggagtgcgtcagggc

SEQ ID NO: 884302 - DNA, 75 bp, synthetic construct
  source 1..75: mol_type = other DNA
ggactctgtgcgcaccggataccgctcaaaaggcagtgtgaacggatacagcacaggtctgtatgccacctggtt

SEQ ID NO: 884303 - DNA, 75 bp, synthetic construct
  source 1..75: mol_type = other DNA
cctgaaccgacaccagagccgaagcctgaaccaggccctggcggttatgacaatgacctgcgcccggaggccggt

SEQ ID NO: 884304 - DNA, 75 bp, synthetic construct
  source 1..75: mol_type = other DNA
cccgtcttcatgaacgtctggggccgatgcagtacaccgatatcatgaccggtgagacgaaaaataccagcatgt

SEQ ID NO: 884305 - DNA, 75 bp, synthetic construct
  source 1..75: mol_type = other DNA
tcatgaatttgttagcggcaaaatagacagtgacgataagtcgaaactcatcgccaggaaatggccgaaacagta

SEQ ID NO: 884306 - DNA, 75 bp, synthetic construct
  source 1..75: mol_type = other DNA
tattgtttttgctgatagcggttgtggttggtggcggcgggttattgctggcgcaaaaagccttacataaaacgt

SEQ ID NO: 884307 - DNA, 75 bp, synthetic construct
  source 1..75: mol_type = other DNA
ttgtcaaccataattggcgctttattatcaaatgattatgcctcgacctcttctgagaaaatcgaccttaatgga

SEQ ID NO: 884308 - DNA, 75 bp, synthetic construct
  source 1..75: mol_type = other DNA
agaatcaggacttactggtcaatataaatgatatatcattagtaatgaaaaaaggtattttctgtgaaatttaca

SEQ ID NO: 884309 - DNA, 75 bp, synthetic construct
  source 1..75: mol_type = other DNA
ggatggcagccacaccctgacggcgacggtcaatgacaaagcgggcaacccggcgagcaccacgcataatctggc

SEQ ID NO: 884310 - DNA, 75 bp, synthetic construct
  source 1..75: mol_type = other DNA
acgctgccgaatctggtaacgcccagaccatcagcggccaggtcacgggtgcagcggcgggcagtaccgtcaccg

SEQ ID NO: 884311 - DNA, 75 bp, synthetic construct
  source 1..75: mol_type = other DNA
gtgggcatattcacccgctaaacctcgccattggtgaagccgatgccatccgcctgaacggcgggcgcgtgtatg

SEQ ID NO: 884312 - DNA, 75 bp, synthetic construct
  source 1..75: mol_type = other DNA
agcgtaccgacagccgacgtaagcgccctgaccgccagcaactacaccgttagcgcggcggtgagcgacaaagcc

SEQ ID NO: 884313 - DNA, 75 bp, synthetic construct
  source 1..75: mol_type = other DNA
attaacaccgtttccggcgacgatgtgattaacgccgccgaaaaaggggcagatttaaccctttccggcagcacc

SEQ ID NO: 884314 - DNA, 75 bp, synthetic construct
  source 1..75: mol_type = other DNA
gcaggcgctggtgatttccggttccagcaccggcggagaagcgggggatgtcgtcaccgtcacgctaaacagtaa

SEQ ID NO: 884315 - DNA, 75 bp, synthetic construct
  source 1..75: mol_type = other DNA
cacagcggtgggcatattcatccgctaaacctcgccattggcgaagcggacgccatccgcctcaacggcgggcgc

SEQ ID NO: 884316 - DNA, 75 bp, synthetic construct
  source 1..75: mol_type = other DNA
gtgaccctacttacaaggtgagtgagaactccggtctggttgtcccacgtatgaccgactccgattattcatttt

SEQ ID NO: 884317 - DNA, 75 bp, synthetic construct
  source 1..75: mol_type = other DNA
ggtgatatctcctttgatgcggtgtttggtgtgtcgcctggttcctttgtcctggatgcttcagccgatgcctct

SEQ ID NO: 884318 - DNA, 75 bp, synthetic construct
  source 1..75: mol_type = other DNA
atgccgtgcggcacgcaggtgatcaccaccgagcggctgtcggaagatttagcccgttcgctgatcccgaaaaac

SEQ ID NO: 884319 - DNA, 75 bp, synthetic construct
  source 1..75: mol_type = other DNA
cgataaccgcctgttgtacggcggcggcgtggtctacggcgcacgcgacccggacgatgttgagcgccttgtggt

SEQ ID NO: 884320 - DNA, 75 bp, synthetic construct
  source 1..75: mol_type = other DNA
agcccgttcgctgatcccgaaaaactactgcgtggaagactgtaattatctgcttgattactaccgtcttaccgc

SEQ ID NO: 884321 - DNA, 75 bp, synthetic construct
  source 1..75: mol_type = other DNA
ggatgccagcggtaactggagcgttggcgtcccggcaagcgtcgtctcggcgctggcaaacggtacggtcaccat

SEQ ID NO: 884322 - DNA, 75 bp, synthetic construct
  source 1..75: mol_type = other DNA
gaacgcggcggtgagcgacaaagccggaaacccggcctcggttaatcacaacctgacggtggatatgaaccgccc

SEQ ID NO: 884323 - DNA, 75 bp, synthetic construct
  source 1..75: mol_type = other DNA
aacacggtgagctacggcacttcgctacacctgcgcatcaccgatcccaacggcattaacgtctattacggcaat

SEQ ID NO: 884324 - DNA, 75 bp, synthetic construct
  source 1..75: mol_type = other DNA
gattgcggcgagcggtagcacctctgccggaaatccggtaagcgttacgcatccggtgacggtcgatctctcggc

SEQ ID NO: 884325 - DNA, 75 bp, synthetic construct
  source 1..75: mol_type = other DNA
cctccgccgtaggtgcgctgggcgaagccagttacgcggtgacggcgaacgttaccgacagcgcaggcaacagca

SEQ ID NO: 884326 - DNA, 75 bp, synthetic construct
  source 1..75: mol_type = other DNA
gggctggcagaaggcacgccgcttaccgtcacgattaataatgtggaatacaccaccgcggtgcaggccgatggt

SEQ ID NO: 884327 - DNA, 75 bp, synthetic construct
  source 1..75: mol_type = other DNA
ccgtgacgctgggcggcaatacctacaccaccaccgttcaggccaatttaagctggagcgtgagcgttccggcgg

SEQ ID NO: 884328 - DNA, 75 bp, synthetic construct
  source 1..75: mol_type = other DNA
ctgaaaaaggcgcggcgttaacgctctccggcagcacctctggcgtcgaagccgggcaaacggtcaccgtgaact

SEQ ID NO: 884329 - DNA, 75 bp, synthetic construct
  source 1..75: mol_type = other DNA
gcgagcgacgatattattaacgctgccgaagcgggcgcgggccagagcatcagcgggcaggcgacgggcgcggcg

SEQ ID NO: 884330 - DNA, 75 bp, synthetic construct
  source 1..75: mol_type = other DNA
gtggaagcggggcaaaccatcactgttatcttcggcggcaaaagctacaccaccacggttgccgcggataatacc

SEQ ID NO: 884331 - DNA, 75 bp, synthetic construct
  source 1..75: mol_type = other DNA
ttcgcaggccaccgacgacactacgccgctgctgaacggtgtactttccgcgccgcttgccagcggtgaagtggt

SEQ ID NO: 884332 - DNA, 75 bp, synthetic construct
  source 1..75: mol_type = other DNA
tgacgctgaacggcgacgtgcccaccgtcaccatcaacacctttgcgggcgatgatgtggtgaatgcagcagaac

SEQ ID NO: 884333 - DNA, 75 bp, synthetic construct
  source 1..75: mol_type = other DNA
ggcgataaccttattaacgccgccgaagcgggcagtgcgctgaccctgagcggcaccggaacgaactttgccgca

SEQ ID NO: 884334 - DNA, 75 bp, synthetic construct
  source 1..75: mol_type = other DNA
gcgtacgctgaccgatggcaactacaactaccaggtgcgggtgatcgacaccgccggaaatatcggcgcgactgc

SEQ ID NO: 884335 - DNA, 75 bp, synthetic construct
  source 1..75: mol_type = other DNA
ctacacctcacagccgggtggcgcggtggtggtcgatccggcgcacaacacctggtatgtgcaactgccggatac

SEQ ID NO: 884336 - DNA, 75 bp, synthetic construct
  source 1..75: mol_type = other DNA
caaacctggaccgcaacggtcggcagcggcggaagctggtcggtgtttattccggcgcagcagtttgccggatta

SEQ ID NO: 884337 - DNA, 75 bp, synthetic construct
  source 1..75: mol_type = other DNA
gggcagcaccgtcaccgttgaactgggcggtaaaacttacaccgccaccgtccaggctgatttaagctggaatgt

SEQ ID NO: 884338 - DNA, 75 bp, synthetic construct
  source 1..75: mol_type = other DNA
cactgccagcgtggcgagcgatggtagctggactgctaccgttcctgccgccgatttagcggcattacccgaggg

SEQ ID NO: 884339 - DNA, 75 bp, synthetic construct
  source 1..75: mol_type = other DNA
accggcgcgcaggctggcgatatcgtcaccgtgaccctcaataatgtggattacaccacggtggtggatgcttct

SEQ ID NO: 884340 - DNA, 75 bp, synthetic construct
  source 1..75: mol_type = other DNA
ggtagataccagcgcgccgatgatcaacgtcaacaccgtggcgggcgacgatattcttaataatgccgaacaggc

SEQ ID NO: 884341 - DNA, 75 bp, synthetic construct
  source 1..75: mol_type = other DNA
tacctacaccaccgtgctggacgccaacggcaactggagcatcggcgtgcctgccagcgtgatttccgcgctggc

SEQ ID NO: 884342 - DNA, 75 bp, synthetic construct
  source 1..75: mol_type = other DNA
accatcaataccgtctccgacgatgacattattaacagtacggagaaaacccaggatctgatcatcagtggcggc

SEQ ID NO: 884343 - DNA, 75 bp, synthetic construct
  source 1..75: mol_type = other DNA
ccatcgccgattacgaccgtaacggcacgggcgatctgtttatcacccgtgatgactacagtacaggctatatca

SEQ ID NO: 884344 - DNA, 75 bp, synthetic construct
  source 1..75: mol_type = other DNA
cgcgggcgatgatgtgatcaacgcgacggaaaaaggatctgatctggcgctttccggcaccagcgatcagcctgc

SEQ ID NO: 884345 - DNA, 75 bp, synthetic construct
  source 1..75: mol_type = other DNA
acgcgggatatcaccattgatgctaacctgccggggctgcgggtggataccgtggcgggcgatgatatcgtcaac

SEQ ID NO: 884346 - DNA, 75 bp, synthetic construct
  source 1..75: mol_type = other DNA
tcacgctgaccattaacgggcaaacctatgttgcggcagtgctggcggatggcacctggagcgtcggcgttccgg

SEQ ID NO: 884347 - DNA, 75 bp, synthetic construct
  source 1..75: mol_type = other DNA
tcactatcactcatccggtcaccgtcgatctggcagcggttgcgatctccattaacaccgtttccggcgacgatg

SEQ ID NO: 884348 - DNA, 75 bp, synthetic construct
  source 1..75: mol_type = other DNA
accgtcactctcaatggcgaaaactatactggcaccgtacaaacggacggtagctggagcgtcagtgtgccgcaa

SEQ ID NO: 884349 - DNA, 75 bp, synthetic construct
  source 1..75: mol_type = other DNA
cggggacggtcacgattgccgccagcggcaacaccaccgccggaaacccggtgagcgttacgcatccggtgactg

SEQ ID NO: 884350 - DNA, 75 bp, synthetic construct
  source 1..75: mol_type = other DNA
ggtaacggcacgcgtgaaatcaccatcgacgcgaatctgcccggtctgcggattgacaccgtggcgggcgatgat

SEQ ID NO: 884351 - DNA, 75 bp, synthetic construct
  source 1..75: mol_type = other DNA
cggcaccaccaccgcgcccgtcgggcagacgctgaccctgaccttaaacggcaaaacctacaccaccacggtgca

SEQ ID NO: 884352 - DNA, 75 bp, synthetic construct
  source 1..75: mol_type = other DNA
tcacccttaacggtgcaacctacaccggtaatgtacaggcgggcggtagctggagcgtcagcgttcccagttcag

SEQ ID NO: 884353 - DNA, 75 bp, synthetic construct
  source 1..75: mol_type = other DNA
cgccagcgcaccgacgctcaccataaacaccatcgccagcgatgacatccttaacgccgcagaggccggaagccc

SEQ ID NO: 884354 - DNA, 75 bp, synthetic construct
  source 1..75: mol_type = other DNA
tgacggcgctgggtagcggtgcgcagaccatcaccgccagcgtcagcgatcgggcaggcaacagcgacgacgcca

SEQ ID NO: 884355 - DNA, 75 bp, synthetic construct
  source 1..75: mol_type = other DNA
ggtgaatatcacggtaagcggcaccaacagtgccggaacaacctccaccattacccatccggtcaccgtcgatct

SEQ ID NO: 884356 - DNA, 75 bp, synthetic construct
  source 1..75: mol_type = other DNA
tctgcaaattaccggcaccagtaatcagcctgctggcactacggttacggtgacgctgaacgggaaaaattacac

SEQ ID NO: 884357 - DNA, 75 bp, synthetic construct
  source 1..75: mol_type = other DNA
gcaggtgttgaccatcgccagcatcagcaccgatacgggtagctcggcaactgactttatcaccagtgataccac

SEQ ID NO: 884358 - DNA, 75 bp, synthetic construct
  source 1..75: mol_type = other DNA
ggcgatgacgtaattaacaacgttgaacacactcaggcgcagattatcagcggcaccgccacgggcgcggtggca

SEQ ID NO: 884359 - DNA, 75 bp, synthetic construct
  source 1..75: mol_type = other DNA
ataacgtacaggtcaataccgcgctgccgggcgttaccattaatccggtggcgacggacgacattatcaatgccg

SEQ ID NO: 884360 - DNA, 75 bp, synthetic construct
  source 1..75: mol_type = other DNA
tcgacagcccggtggtgatcaccgaaggggaatggctgaaaagcctcaaccgctatccgtttgaggtgcaaagcc

SEQ ID NO: 884361 - DNA, 75 bp, synthetic construct
  source 1..75: mol_type = other DNA
ctcggtatgttggtactgtttgccagcggacgggcgatgcagcgctttcttgactatgtgacggatttacgcctg

SEQ ID NO: 884362 - DNA, 75 bp, synthetic construct
  source 1..75: mol_type = other DNA
aacgctgctgggggctggtgctcgtggtggcgggcgtctgcgtgattacgtttattatctcgcatctgatccctg

SEQ ID NO: 884363 - DNA, 75 bp, synthetic construct
  source 1..75: mol_type = other DNA
atgaggggatctctcagtgctaaacctgcgacctggcagagcaatccggatgcgtactacgacaaaaaccggact

SEQ ID NO: 884364 - DNA, 75 bp, synthetic construct
  source 1..75: mol_type = other DNA
actgcgcatccaggaattactcgggggggacattatcatcattccaaaaatgagaaatttattgtcatccgagga

SEQ ID NO: 884365 - DNA, 75 bp, synthetic construct
  source 1..75: mol_type = other DNA
tgacccaagtaaaaggaaccactgtcaaagcaaaaataaaccatgacttgttccaatcaacatacttccacaatg

SEQ ID NO: 884366 - DNA, 75 bp, synthetic construct
  source 1..75: mol_type = other DNA
aggcgcggcgttaacgctctctggcagcacttctggtgtggaggccgggcaaacggtcaccgtgacctttggcgg

SEQ ID NO: 884367 - DNA, 75 bp, synthetic construct
  source 1..75: mol_type = other DNA
cgttatcggcaccaactggagctatgccgatggtcgcacactgaccgacggcacctggaactacacggtgcgggt

SEQ ID NO: 884368 - DNA, 75 bp, synthetic construct
  source 1..75: mol_type = other DNA
agcgctgggcaacggtgaactgaccatcagcgcctcggtgactaattccgcaaataataccggcaccacaacgca

SEQ ID NO: 884369 - DNA, 75 bp, synthetic construct
  source 1..75: mol_type = other DNA
agctttggcaaacgcgccccgatcccgctgtccggtgaaaaaccgatggcgtatcgccgccgtctgatgattcaa

SEQ ID NO: 884370 - DNA, 75 bp, synthetic construct
  source 1..75: mol_type = other DNA
aatatttttacaacatgtggatgttcgccatccgggtgaccggaacaggggttgcctggcgatctgcagatcagg

SEQ ID NO: 884371 - DNA, 75 bp, synthetic construct
  source 1..75: mol_type = other DNA
agaagacaaagaagcggaagaggcgaaagctaaagccgacgcggaagagaaagccgcgaaggaaaaagctgatgc

SEQ ID NO: 884372 - DNA, 75 bp, synthetic construct
  source 1..75: mol_type = other DNA
cattaaatgccgccgacgctcgcactaatttaggattgggtaccggtcaggctgtaacctttaatggtctaacta

SEQ ID NO: 884373 - DNA, 75 bp, synthetic construct
  source 1..75: mol_type = other DNA
ggtaaagaaaaatcagacccgtattaccgggatggataaccagatcctctcgttgtatgccaaagggataaccac

SEQ ID NO: 884374 - DNA, 75 bp, synthetic construct
  source 1..75: mol_type = other DNA
tacgcccgttttctggcgaacggttctgaatggctggagctggaaggcgcgaaagatcttgatgatgcgctctcc

SEQ ID NO: 884375 - DNA, 75 bp, synthetic construct
  source 1..75: mol_type = other DNA
gttccagtccaaatctaaccgtgtgaagaatcagccacccagggccatcacgcgagaatcagccagccgtgcatt

SEQ ID NO: 884376 - DNA, 75 bp, synthetic construct
  source 1..75: mol_type = other DNA
gccgtaatcagccgcagtatccggcacgagcacaggcattgcgcattgaagggcaggttaaagttaaatttgacg

SEQ ID NO: 884377 - DNA, 75 bp, synthetic construct
  source 1..75: mol_type = other DNA
atcagcgcgctatccgcatgggttggctggtactatattccagcgttgctagtcttttcatctgtaattggtttt

SEQ ID NO: 884378 - DNA, 75 bp, synthetic construct
  source 1..75: mol_type = other DNA
ttgcgctcttaattgttgggttgtgtattggaagttttttgaatgtggtcatttaccgtattccaattactcttc

SEQ ID NO: 884379 - DNA, 75 bp, synthetic construct
  source 1..75: mol_type = other DNA
cagccgtgcggtgcagaacccgctcgccggtaaaaaagaccagccgggcgacctcttctctgtggcctcccttgc

SEQ ID NO: 884380 - DNA, 75 bp, synthetic construct
  source 1..75: mol_type = other DNA
agcctctggcctgacagtccgtttaaacgctacggcgatgtgaccgaagtgaaagcggaaatcatcagtgatgac

SEQ ID NO: 884381 - DNA, 75 bp, synthetic construct
  source 1..75: mol_type = other DNA
tggcgaaaccaggcgaaacactggtcaaacacaaaattgcaacactccaagcacttcaaacactccaagcccttc

SEQ ID NO: 884382 - DNA, 75 bp, synthetic construct
  source 1..75: mol_type = other DNA
atagaataaagaaactcttgtctgaaacaggctggagtcaagcggagcttgggaaattagttggggtgtcgcaac

SEQ ID NO: 884383 - DNA, 75 bp, synthetic construct
  source 1..75: mol_type = other DNA
gcacaacaaaaagttcctaggcaggattaccagcacttacaagacgaggttcaccatgaacacggccctttcacc

SEQ ID NO: 884384 - DNA, 75 bp, synthetic construct
  source 1..75: mol_type = other DNA
ttgactgtaccgatgtcttcgatttaaccaaagctgagattgccggaaggcagcaagcattatgggcaattgacg

SEQ ID NO: 884385 - DNA, 75 bp, synthetic construct
  source 1..75: mol_type = other DNA
atattatcaacagcgtcgagcaggcggcagggcaaaccatcagtggcacgacgaccgcagaagccgggcaaattg

SEQ ID NO: 884386 - DNA, 75 bp, synthetic construct
  source 1..75: mol_type = other DNA
ccgaagcgggcgtagcgcaaaccatcagcgggcaggtgactggagccgccgttggcgacacggtaaccgttacgc

SEQ ID NO: 884387 - DNA, 75 bp, synthetic construct
  source 1..75: mol_type = other DNA
gtggcgaccgacaacgtcatcaacacgccggaacacacccaggcgcaaatcatcagcggcacggtcactggcgca

SEQ ID NO: 884388 - DNA, 75 bp, synthetic construct
  source 1..75: mol_type = other DNA
ccgatggacaacagcttacacatgtcacttttgctgatactgctgcgggtggtttagcccctgtggagctggtag

SEQ ID NO: 884389 - DNA, 75 bp, synthetic construct
  source 1..75: mol_type = other DNA
cagcggcacgaccacggcgcccgcaggccagaccgtgactctgacgctgaacggcaagacttacaccaccaccgt

SEQ ID NO: 884390 - DNA, 75 bp, synthetic construct
  source 1..75: mol_type = other DNA
ccagagcatcagcgggcaagtgacgggcgcggcagcgggcgacacggtaaccgtcacgctcggcggggcgactta

SEQ ID NO: 884391 - DNA, 75 bp, synthetic construct
  source 1..75: mol_type = other DNA
taaccgcactggctaataacggctacaccctgaccgccacggtcagcgatctggcgggtaaccctggcagcgcca

SEQ ID NO: 884392 - DNA, 75 bp, synthetic construct
  source 1..75: mol_type = other DNA
accgtggcaggcgatgatgtgattaacagcattgagcacactcaggcgttggtggttaccggcagtagcaccggg

SEQ ID NO: 884393 - DNA, 75 bp, synthetic construct
  source 1..75: mol_type = other DNA
gcagttacaccgtgaccgccacggtgagcgacaaagcgggtaacccggcaagcgccgaccacgcgctggcggtag

SEQ ID NO: 884394 - DNA, 75 bp, synthetic construct
  source 1..75: mol_type = other DNA
cgctacaaccgattcttccggcaactggagcgccacggtgccagcgtcagcggttagcgcattgggtgaggccaa

SEQ ID NO: 884395 - DNA, 75 bp, synthetic construct
  source 1..75: mol_type = other DNA
agcacggacaggcgctggtgatcaccggcggcagtagcggcctgaatgcaggcgtgccgttgacgattactatca

SEQ ID NO: 884396 - DNA, 75 bp, synthetic construct
  source 1..75: mol_type = other DNA
aggcgctgggcaacggcgagctgaccatttcggcttcggtaacgaacagcgtaggcaataccggtaacggcacgc

SEQ ID NO: 884397 - DNA, 75 bp, synthetic construct
  source 1..75: mol_type = other DNA
atgccaacgaagcaggttcggcgctgaccatcagcggcaccagcacggcggaagccgggcagacggtaaccgtga

SEQ ID NO: 884398 - DNA, 75 bp, synthetic construct
  source 1..75: mol_type = other DNA
gcctatgtatacgcgaaaatgctaaccgaggcagctaaaaccctggtcgaagccctcatcgaaggccaactgact

SEQ ID NO: 884399 - DNA, 75 bp, synthetic construct
  source 1..75: mol_type = other DNA
tttaactctttccggcaccaccacgaatgtagaagccggacaaacggtcaccgtgacctttggcggtaaaaatta

SEQ ID NO: 884400 - DNA, 75 bp, synthetic construct
  source 1..75: mol_type = other DNA
gaaagtagcaccggaaacccggtgagcattacacatccggtaacggtggatctcactccggcagctatcaccatc

SEQ ID NO: 884401 - DNA, 75 bp, synthetic construct
  source 1..75: mol_type = other DNA
aacggtcggcagcggcggaagctggtcggtgtttattccggcgcagcagtttgccggattaagcgacggcagcta

SEQ ID NO: 884402 - DNA, 75 bp, synthetic construct
  source 1..75: mol_type = other DNA
cctggcctgcgggtcgataccgtggcgggcgatgatgttattaacagcattgagcacaatcaggcgctggtgatc

SEQ ID NO: 884403 - DNA, 75 bp, synthetic construct
  source 1..75: mol_type = other DNA
tagcagctccggctttgcggcgggcacggcgctgaccgtagtgataaataatcaaacttacgccgccacggtgct

SEQ ID NO: 884404 - DNA, 75 bp, synthetic construct
  source 1..75: mol_type = other DNA
accgccgaagcggggcagacggtaaccgtcacgcttaatggcgtgacttacagcggcaccgtccaggcggacggc

SEQ ID NO: 884405 - DNA, 75 bp, synthetic construct
  source 1..75: mol_type = other DNA
aacctacactgcaagcgtcgccgccaacggtagctggagtgtgaaagttccagcggcagatctagcaactctgcc

SEQ ID NO: 884406 - DNA, 75 bp, synthetic construct
  source 1..75: mol_type = other DNA
aaagatgcattgtattcaattcctgttattgagcttaaagaaaaggcccaaaaatacatcggggataaagtacgc

SEQ ID NO: 884407 - DNA, 75 bp, synthetic construct
  source 1..75: mol_type = other DNA
aaagatgcattgtattcaattccagttattgagcttaaagaaaaggcccaaaaatacatcggggataaagttcgc

SEQ ID NO: 884408 - DNA, 75 bp, synthetic construct
  source 1..75: mol_type = other DNA
cagcgatttgcagctctccggtaccacctccgatgtggaagcggggcaaaccatcaccgttatcttcggcggcaa

SEQ ID NO: 884409 - DNA, 75 bp, synthetic construct
  source 1..75: mol_type = other DNA
tcaatacaccgccaccgtgcagccagatttaagctggagcgtcagcgtgcctgcgaacgttttgcaggcgctggg

SEQ ID NO: 884410 - DNA, 75 bp, synthetic construct
  source 1..75: mol_type = other DNA
tcaccgtgatgttgaacggcctggcgtacagcgccaccaccgatagttccggcaactggagcgttaccgtgcctg

SEQ ID NO: 884411 - DNA, 75 bp, synthetic construct
  source 1..75: mol_type = other DNA
aagatgactattatattgagccacaggcagagttgacttatggttatattagtagtcaaagtataactttgtgga

SEQ ID NO: 884412 - DNA, 75 bp, synthetic construct
  source 1..75: mol_type = other DNA
cagagattttgcagaaaataaggggcaattctctccggggagtctcaatttaaatatttatgataagcatggggc

SEQ ID NO: 884413 - DNA, 75 bp, synthetic construct
  source 1..75: mol_type = other DNA
aaccagtattctgatggcctgggtgtttacccttccggctgcggtactgctttccggcgggctgtactggctctc

SEQ ID NO: 884414 - DNA, 75 bp, synthetic construct
  source 1..75: mol_type = other DNA
gcaatggccgcgtaaatgcgatgaaaattaaagctctccgtatgttctcgcattatcacctgggtacggtatctc

SEQ ID NO: 884415 - DNA, 75 bp, synthetic construct
  source 1..75: mol_type = other DNA
atagacaaaaacgatggtaaaggaactcatccaaatattgttactggaaaatccattgcttctgataataacaaa

SEQ ID NO: 884416 - DNA, 75 bp, synthetic construct
  source 1..75: mol_type = other DNA
ttctcatccatcgaactctcaagtggacgcccaacagtagtattaacaaatgaaaaacagataaacccagattct

SEQ ID NO: 884417 - DNA, 75 bp, synthetic construct
  source 1..75: mol_type = other DNA
ttgattcaggacgacgatttagatgtctattcaagcgaagccatcaatattcagagttcattgatatcacttgct

SEQ ID NO: 884418 - DNA, 75 bp, synthetic construct
  source 1..75: mol_type = other DNA
caactggatggcgtcctaaagcttctatgacgctgctgaccggtggtgaggcgatgccgttggcattggcgaaaa

SEQ ID NO: 884419 - DNA, 75 bp, synthetic construct
  source 1..75: mol_type = other DNA
cgtgtcgttgccgtacagcagcaactgaaggagtctggtgttggcccgaatgacgttgtcgggttattgctgcat

SEQ ID NO: 884420 - DNA, 75 bp, synthetic construct
  source 1..75: mol_type = other DNA
ataacaagacatggttcgtcgcccacagcctgggatgtgtgacaatacttcggttgttagctcaactaacggtaa

SEQ ID NO: 884421 - DNA, 75 bp, synthetic construct
  source 1..75: mol_type = other DNA
ataaccgataataactataccgctggtttgttagggaaggtgcgaataagcaggtcatttcttcccaagctgact

SEQ ID NO: 884422 - DNA, 75 bp, synthetic construct
  source 1..75: mol_type = other DNA
gctgcttttaacggtgggatgaatttaggtgcatggcgactgcgtgcctcgggcaactacaactggatgaccgat

SEQ ID NO: 884423 - DNA, 75 bp, synthetic construct
  source 1..75: mol_type = other DNA
gcggtgtatatactgcggggttaaaaaacatctggccattgatttgttggctcaaaaacttccggctgcatctgt

SEQ ID NO: 884424 - DNA, 75 bp, synthetic construct
  source 1..75: mol_type = other DNA
gtggtgaaccggccacgctgctctgcgatgggaatctcggctttcctccaaaagatgaccgtggcagagaatgca

SEQ ID NO: 884425 - DNA, 75 bp, synthetic construct
  source 1..75: mol_type = other DNA
tcaactaaagatgatctttgcataatacaaaaaaaacagtcttctttaaaccggctcaggaataacaatatatat

SEQ ID NO: 884426 - DNA, 75 bp, synthetic construct
  source 1..75: mol_type = other DNA
gcaatagtttaacagatataatagcaactacaattattgatttatcaaaacaactgcatatagatgttattgctg

SEQ ID NO: 884427 - DNA, 75 bp, synthetic construct
  source 1..75: mol_type = other DNA
tgaggacgtcagctacgtcctggaagagctaaaagccaaaggtctgtgccgtgactttctcgccacgacgtcagg

SEQ ID NO: 884428 - DNA, 75 bp, synthetic construct
  source 1..75: mol_type = other DNA
gccagcgtaatcaccgatgttgcggatggcacgatttcagcctccagtaaggatgcggttaacggttcccaactg

SEQ ID NO: 884429 - DNA, 75 bp, synthetic construct
  source 1..75: mol_type = other DNA
tgcacaaatggtttatgaagtatatgcaacatggatggatgatatgaacaaagatcaaattgaactaattaatag

SEQ ID NO: 884430 - DNA, 75 bp, synthetic construct
  source 1..75: mol_type = other DNA
ctacgttttttcaaggtatcgatttcgtggaaagcgtaatactttaatgagtattcttgtattgcaaatgtttcc

SEQ ID NO: 884431 - DNA, 75 bp, synthetic construct
  source 1..75: mol_type = other DNA
cgggatgaaaatggtgaacttcgtaaaaaatatccaaatgaagtagtaaaaaaaacgcgatttaatattttatct

SEQ ID NO: 884432 - DNA, 75 bp, synthetic construct
  source 1..75: mol_type = other DNA
aatatattgagaatgcacataaaaatattatagataatgatgagttaaaacatgaaatttctggtaatgctgcca

SEQ ID NO: 884433 - DNA, 75 bp, synthetic construct
  source 1..75: mol_type = other DNA
cagagatacctgacagcactggaaccgttctctgcatatgagatcggcgtaagcgcaacagaatatcttcctgtg

SEQ ID NO: 884434 - DNA, 75 bp, synthetic construct
  source 1..75: mol_type = other DNA
gcctgcccgtcacctcgctggcgctgcgctatatcgccgccgccatgctgattggtttaatccgcgggattatca

SEQ ID NO: 884435 - DNA, 75 bp, synthetic construct
  source 1..75: mol_type = other DNA
atataaaaacacagcgctattccagcgcatcgaataacagtattgatattgtctgtgacatacaagggatcggta

SEQ ID NO: 884436 - DNA, 75 bp, synthetic construct
  source 1..75: mol_type = other DNA
tcctgatatcgcggctggtgccaaatttgcctacttcggcgattttaaccgctttatcgttcgtcgtgtcactta

SEQ ID NO: 884437 - DNA, 75 bp, synthetic construct
  source 1..75: mol_type = other DNA
gctacgccgaacgtgttgttgcaggagaaattgtcgctggcgaatttgtccgtctggcctgccagcgttttcttg

SEQ ID NO: 884438 - DNA, 75 bp, synthetic construct
  source 1..75: mol_type = other DNA
ttttagccagtcctgttatgatagtattgttactatcagaagtattacttggtgtattatcgagatttgctccgc

SEQ ID NO: 884439 - DNA, 75 bp, synthetic construct
  source 1..75: mol_type = other DNA
agcattattgacaaccagcgtggggcaacgcttagtagttcaattgatcctgccaatggtgttgatacgtctgag

SEQ ID NO: 884440 - DNA, 75 bp, synthetic construct
  source 1..75: mol_type = other DNA
gcgctttcggctctgaataagtttaaagagcaaaatgtttatttaagagggcttatcccccttcttggctataaa

SEQ ID NO: 884441 - DNA, 75 bp, synthetic construct
  source 1..75: mol_type = other DNA
gcgataacagggacagtgattcagtctttaaaagaaccacagcaaataaattctactcgctaatgagttggttag

SEQ ID NO: 884442 - DNA, 75 bp, synthetic construct
  source 1..75: mol_type = other DNA
ttttaggtgcaatgattccaaatatggatgaaggttttgaaattaaaacccgtgacggcgcgatacttcgcgttg

SEQ ID NO: 884443 - DNA, 75 bp, synthetic construct
  source 1..75: mol_type = other DNA
tggcacttcccgcaagagatgcgagctatgccgggttccaagagcattcgtccagattacagcgtcccactggtt

SEQ ID NO: 884444 - DNA, 75 bp, synthetic construct
  source 1..75: mol_type = other DNA
agcacaatctgtaaaaaaatagaaaatatgtcaccggagattattaatacagaaacagcatcatcatcaaattaa

SEQ ID NO: 884445 - DNA, 75 bp, synthetic construct
  source 1..75: mol_type = other DNA
taaggggggtttctggtagtgttattgtagtagatagttttagcacaatctgtaaaaaaatagaaaatatgtcac

SEQ ID NO: 884446 - DNA, 75 bp, synthetic construct
  source 1..75: mol_type = other DNA
gctcgttcaggacaaagactatgacttggtctcccatgatgtccttttggcacatgcataccatcagagggagga

SEQ ID NO: 884447 - DNA, 75 bp, synthetic construct
  source 1..75: mol_type = other DNA
tagctgatatattaacaagccatgcaaagggaaattttactgatatttttgagcagtattatccattagcatggc

SEQ ID NO: 884448 - DNA, 75 bp, synthetic construct
  source 1..75: mol_type = other DNA
ctggaatatattttgaaaaacatccagaaaaaatgttgtcgtgcaatgatgtatttatacaaatggctgcttatg

SEQ ID NO: 884449 - DNA, 75 bp, synthetic construct
  source 1..75: mol_type = other DNA
gtatcctttaaaaaaaatgctctcgctggcgctggaaggaataacttcccttacaattactccattgcgtatgat

SEQ ID NO: 884450 - DNA, 75 bp, synthetic construct
  source 1..75: mol_type = other DNA
tgatcttgatattcatgcttaccgctatgtgatgaaaccgacgttacctattcgtcgcgatagcccgaaaaaggc

SEQ ID NO: 884451 - DNA, 75 bp, synthetic construct
  source 1..75: mol_type = other DNA
gcctttgcctccgcaccgcaagaagacgaagcgctgcgtctgaagatgaaagcgattgttgcccgtggcgcagga

SEQ ID NO: 884452 - DNA, 75 bp, synthetic construct
  source 1..75: mol_type = other DNA
ataactgcgtcgatatctacccgcaactgaataaagcgttttctggcggtaatgcggtcaatgtggcggtgtact

SEQ ID NO: 884453 - DNA, 75 bp, synthetic construct
  source 1..75: mol_type = other DNA
caatttcacatggcaacaggtgatgatcactacaccgatctcgcaagtttactcaatgcccacttcaaaccgggc

SEQ ID NO: 884454 - DNA, 75 bp, synthetic construct
  source 1..75: mol_type = other DNA
atgcttctggctaccggaaagtgcgttggcaacagggtatcgtcggcagggatttgagcaggcctggcgtgatgc

SEQ ID NO: 884455 - DNA, 75 bp, synthetic construct
  source 1..75: mol_type = other DNA
caattaccttgattttggcggtgctgctgggcggcatggttggcgcggggattgtgctggggcgtaacgctctac

SEQ ID NO: 884456 - DNA, 75 bp, synthetic construct
  source 1..75: mol_type = other DNA
tacctgcaatctggtggtggatattcacaaaccacaaaaatcagcaaaaaaatcgaagcaacaggataaaactgg

SEQ ID NO: 884457 - DNA, 75 bp, synthetic construct
  source 1..75: mol_type = other DNA
atgacgtcattatcagaacagctgcaggcaataaatgccgcgtatcaggcgtccctgaaaaatgagaaaaaacag

SEQ ID NO: 884458 - DNA, 75 bp, synthetic construct
  source 1..75: mol_type = other DNA
gcgcatcaagtggtattggggaaggtattgccagagagctgggaacgacaggtgcaaaggttttactgggagcac

SEQ ID NO: 884459 - DNA, 75 bp, synthetic construct
  source 1..75: mol_type = other DNA
cactctggatcggtaatagactgacagagtttaatagtttagagacttcacatgccattgccgccataaagatat

SEQ ID NO: 884460 - DNA, 75 bp, synthetic construct
  source 1..75: mol_type = other DNA
cgccggtatatgggcagaggctggctatcagaaagggaataagatggagtcaccagtgacaggaactgtcggttt

SEQ ID NO: 884461 - DNA, 75 bp, synthetic construct
  source 1..75: mol_type = other DNA
tggaggcagtgctacagacacattaattagtggcggagaccagcatgtctccagcggcggcagcgccatcaatac

SEQ ID NO: 884462 - DNA, 75 bp, synthetic construct
  source 1..75: mol_type = other DNA
taccaagggaatgtattattgcagctatgcgtgcctatgatgagggaatcactcatccgtttagtgagtctcggt

SEQ ID NO: 884463 - DNA, 75 bp, synthetic construct
  source 1..75: mol_type = other DNA
caaaaaaaataaattatctatacacggatttcttaaatatccatgtgagacgttattttatttatggctcaaaat

SEQ ID NO: 884464 - DNA, 75 bp, synthetic construct
  source 1..75: mol_type = other DNA
tcggttcattctttttatctctagttgttccaatcaccactggggttgtggcagcaggatttactgcatttttcg

SEQ ID NO: 884465 - DNA, 75 bp, synthetic construct
  source 1..75: mol_type = other DNA
tgacgttgaattaaaacaacgactcgagcaagtctggaataagctggataaccctaagaggaaaagcttaattat

SEQ ID NO: 884466 - DNA, 75 bp, synthetic construct
  source 1..75: mol_type = other DNA
gaatttatggagcgaagtaattcagcacgtcttgtactacgaaaagaaaagagaagaaacggtattgtaaattgt

SEQ ID NO: 884467 - DNA, 75 bp, synthetic construct
  source 1..75: mol_type = other DNA
cccgtgccaaatgtattgccgggtatattatctattgtgtttatgtatgtaggttatctggtggtgaaatacttt

SEQ ID NO: 884468 - DNA, 75 bp, synthetic construct
  source 1..75: mol_type = other DNA
tgccagcaacgatgagacggggcaacaaagtatcgtcgatgagggcggcatactatatctctctgggatatcgag

SEQ ID NO: 884469 - DNA, 75 bp, synthetic construct
  source 1..75: mol_type = other DNA
accctgaaatgacgttcctggaaaaagcagaaatcgaaaaactgttaaatgttttggctggtgatgacttacttg

SEQ ID NO: 884470 - DNA, 75 bp, synthetic construct
  source 1..75: mol_type = other DNA
ctactgcggcactggggatattaccttcggttataggtcagtttcatcagcaacaaaagagacgaccttgcaagt

SEQ ID NO: 884471 - DNA, 75 bp, synthetic construct
  source 1..75: mol_type = other DNA
ttacagcctgaattatcaatacagccgctacactgatcaaaataatgaccgcgcactctctttgaatctcagtat

SEQ ID NO: 884472 - DNA, 75 bp, synthetic construct
  source 1..75: mol_type = other DNA
tatggcaccttcagtgccggatacagctacggtaatgacagcagccaatacaattacggcgttaccggcggcgtg

SEQ ID NO: 884473 - DNA, 75 bp, synthetic construct
  source 1..75: mol_type = other DNA
tgaacctcctttctgttaaccagtttatgcaaaaatttattttttttctctccatgctaatttctccgaatcata

SEQ ID NO: 884474 - DNA, 75 bp, synthetic construct
  source 1..75: mol_type = other DNA
atgtattgacgagtgaaaccagtaaatttggtgttatttcgttgaaaggttttttacagtttgccgaaagtggca

SEQ ID NO: 884475 - DNA, 75 bp, synthetic construct
  source 1..75: mol_type = other DNA
ctcagggacgcacgacctgcctgcacaacgtagcacctggcatgattttttgccttcaggcaccgcatctgtttc

SEQ ID NO: 884476 - DNA, 75 bp, synthetic construct
  source 1..75: mol_type = other DNA
atgttcgctttactcctgctcacgccgctgcttttttcgctgctctgttttgccgcgacttgtacggtgactgta

SEQ ID NO: 884477 - DNA, 75 bp, synthetic construct
  source 1..75: mol_type = other DNA
cgttgtattcagttgagatttcagagattcaggccgtttcgttgttaatggggagccgtctggagatagacggca

SEQ ID NO: 884478 - DNA, 75 bp, synthetic construct
  source 1..75: mol_type = other DNA
ggtagacacctcagcacccgtggtcagtgttaataccgtggcgggcgacgatattcttaataatgctgagcaggc

SEQ ID NO: 884479 - DNA, 75 bp, synthetic construct
  source 1..75: mol_type = other DNA
ttattgctgttaacgctggtgctggcgggcctggtacggatggctgcgcgggggttaatggcgaaaccgccgcag

SEQ ID NO: 884480 - DNA, 75 bp, synthetic construct
  source 1..75: mol_type = other DNA
tggcgcgtaatcacctgctgattatcgtcctgctgttattgctgttaacgctggtgctggcgggcctggtacgga

SEQ ID NO: 884481 - DNA, 75 bp, synthetic construct
  source 1..75: mol_type = other DNA
aacagaaaaaagatccgaagtaaaagatttcgggcgtaaactaaacataactgtattagatgggaacttcttaag

SEQ ID NO: 884482 - DNA, 75 bp, synthetic construct
  source 1..75: mol_type = other DNA
gccacaccgccagcaggctggttacagtgcaacggagctacgttcaccaaagaacaatatcctgttctagccaga

SEQ ID NO: 884483 - DNA, 75 bp, synthetic construct
  source 1..75: mol_type = other DNA
caccccctcccatcacacgattgcccgagggatgggaatgatttcagcaaaacaattacagcccctttttatcca

SEQ ID NO: 884484 - DNA, 75 bp, synthetic construct
  source 1..75: mol_type = other DNA
gccaggaagcgaattagatgtcgcctggcgttctgctgtcgaaaaaaccgaggtcagatcgacggctgaaaaagc

SEQ ID NO: 884485 - DNA, 75 bp, synthetic construct
  source 1..75: mol_type = other DNA
gatgatgcacggacgataaataaattatgggaacgcctgcgggataaccacggcattgatgccacgcgcctgcgc

SEQ ID NO: 884486 - DNA, 75 bp, synthetic construct
  source 1..75: mol_type = other DNA
ggctgagtcagtaccgcgcatacgacagccgtggacagttaattgccgtgaaagacacgcagggccatgaaacgc

SEQ ID NO: 884487 - DNA, 75 bp, synthetic construct
  source 1..75: mol_type = other DNA
tctggggcatgcaacaattcagcagacgatggcttatgcacatctggcccctgattatcttcagaacgccataat

SEQ ID NO: 884488 - DNA, 75 bp, synthetic construct
  source 1..75: mol_type = other DNA
cacgtgtgaacgtggccagggcatatcaggccccaattacctttactgcagcctccaatgcaacggaatgtgaac

SEQ ID NO: 884489 - DNA, 75 bp, synthetic construct
  source 1..75: mol_type = other DNA
cgccgattcatccgttacgccgctggcgttcctgactgatctgccatcaaccaaagcagttagtgttggagatgc

SEQ ID NO: 884490 - DNA, 75 bp, synthetic construct
  source 1..75: mol_type = other DNA
ccttgaggatgtctttaagctttataaacttggggggtggccgtgtgggctaaagggacatgatattctcgtctt

SEQ ID NO: 884491 - DNA, 75 bp, synthetic construct
  source 1..75: mol_type = other DNA
attctatttatatgcttatatttatggccattaaggttttttatcgaccattaccaatggtatgcaatccgtatt

SEQ ID NO: 884492 - DNA, 75 bp, synthetic construct
  source 1..75: mol_type = other DNA
tcgaaacgctaatgtaatgtttgaattaggaatgcgtctcgcatttgacaaaccgaccgtaattattaaggacga

SEQ ID NO: 884493 - DNA, 75 bp, synthetic construct
  source 1..75: mol_type = other DNA
gctattagtgtatgtctgacatatctaatttgtgattggtttatgttctttattcgtctttataactttatgaaa

SEQ ID NO: 884494 - DNA, 75 bp, synthetic construct
  source 1..75: mol_type = other DNA
taattttctgggcggacgtgacggcgttaatatgctggggaatatggtttcttccgtcaaagatattattgccgg

SEQ ID NO: 884495 - DNA, 75 bp, synthetic construct
  source 1..75: mol_type = other DNA
gctattcaatgaccgtacagccagttcatgtctccacccgcacggcagcacggggaatactggagatggaactgt

SEQ ID NO: 884496 - DNA, 75 bp, synthetic construct
  source 1..75: mol_type = other DNA
tatgacaaaagaaaacttaatggattatgagtttagagtgatatgcaaacattgcggattcgttacaagttattt

SEQ ID NO: 884497 - DNA, 75 bp, synthetic construct
  source 1..75: mol_type = other DNA
atctgttgcagtgtttgtgtaataaggtttttgatttctcgattgaaactcgcagtaaaaacatcaccgccagtt

SEQ ID NO: 884498 - DNA, 75 bp, synthetic construct
  source 1..75: mol_type = other DNA
aaacagtatcgatctgcctttacctgacggaaatatgataccgggtggggctcaacagttaggtaccgcacgcct

SEQ ID NO: 884499 - DNA, 75 bp, synthetic construct
  source 1..75: mol_type = other DNA
attcagtgcagtcatgagtgcctacaagactcaattacagaacaccacctatacaccacctctgggcactgttac

SEQ ID NO: 884500 - DNA, 75 bp, synthetic construct
  source 1..75: mol_type = other DNA
attcggacaaagaaaacacaggtggtggtatatacctccgtacactgaaaacgctttacgaacggaatggttata

SEQ ID NO: 884501 - DNA, 75 bp, synthetic construct
  source 1..75: mol_type = other DNA
ggcgcttttatgggttattcccattcacatatcggttttgatcgtggaggacatggcagtgtgggcagttattct

SEQ ID NO: 884502 - DNA, 75 bp, synthetic construct
  source 1..75: mol_type = other DNA
cccaaatccaaatccgaacccgaacccgaacccaaatccgaacccaaatccgaacccaaatccaaatccaaatcc

SEQ ID NO: 884503 - DNA, 75 bp, synthetic construct
  source 1..75: mol_type = other DNA
tcctgctgacaaatggcggcgtgttaaccgtggagtcagacaccacttccgccaaaacacaggtcaatgcgggcg

SEQ ID NO: 884504 - DNA, 75 bp, synthetic construct
  source 1..75: mol_type = other DNA
attttaaataaaatttcaatattttgcccaaagattatagctgagggggttgagtcaagatatatcatggataaa

SEQ ID NO: 884505 - DNA, 75 bp, synthetic construct
  source 1..75: mol_type = other DNA
cggcctgcagcagcagctggatgatctgactgagaagcttgcatcacaggaggctggcaatgccaaaaaacagcc

SEQ ID NO: 884506 - DNA, 75 bp, synthetic construct
  source 1..75: mol_type = other DNA
gacggtaacagtaactggaacctgaccaataatgtcaacccaaacccaaacccaaacccaaacccaaacccaaac

SEQ ID NO: 884507 - DNA, 75 bp, synthetic construct
  source 1..75: mol_type = other DNA
ggcacaattgcgtcttctcgatcagcttcttgaagactatggtgaccggctcaaggagttgacaaagagtcctaa

SEQ ID NO: 884508 - DNA, 75 bp, synthetic construct
  source 1..75: mol_type = other DNA
cccgcctgatgcaatcatgaagcgtgagcagtctcttatgtttggcaagaatccgcatcatggccgttacggttt

SEQ ID NO: 884509 - DNA, 75 bp, synthetic construct
  source 1..75: mol_type = other DNA
ataattatgtcttcaggatggataccgatgatatatgtcacccagagcgactattgcaacaattatcttttttta

SEQ ID NO: 884510 - DNA, 75 bp, synthetic construct
  source 1..75: mol_type = other DNA
atggcgtcgataacgcaacgctaactgcaacggttaaagatcagttcgacaatgaggtgaataatcttccggtaa

SEQ ID NO: 884511 - DNA, 75 bp, synthetic construct
  source 1..75: mol_type = other DNA
ctgcgacgattaccagtctggagatacctgaaggtcaggtaatggtcgcacaagacgtagcagttaaagctcacg

SEQ ID NO: 884512 - DNA, 75 bp, synthetic construct
  source 1..75: mol_type = other DNA
ccagcaggaggtaaccctcagagtatcaccaagtgaaggcgtgacccccagtaataacgctatatatactaccaa

SEQ ID NO: 884513 - DNA, 75 bp, synthetic construct
  source 1..75: mol_type = other DNA
acttaaatttttatcctcattgataggaataattatacttctattttactgttacttcttttctagagaaagtta

SEQ ID NO: 884514 - DNA, 75 bp, synthetic construct
  source 1..75: mol_type = other DNA
cttggggcaattgttacttattactctgaagtaataatgacatttctatatggcaataagtatttaggttctgga

SEQ ID NO: 884515 - DNA, 75 bp, synthetic construct
  source 1..75: mol_type = other DNA
ttaccttgcgaaaggtgctgagtatgtccgcctggatgccgttggctttatgtggaaagagccgggaacaagctg

SEQ ID NO: 884516 - DNA, 75 bp, synthetic construct
  source 1..75: mol_type = other DNA
gggcggcggtggacttggtgccgccataacgccctggttagttcaacatagcgaaacctgggtgatgctgccaac

SEQ ID NO: 884517 - DNA, 75 bp, synthetic construct
  source 1..75: mol_type = other DNA
acactatctcgaaaaaatcgccggcgtttacgacagcttatacaccgccattgaaaacaataccccggtgaattt

SEQ ID NO: 884518 - DNA, 75 bp, synthetic construct
  source 1..75: mol_type = other DNA
caattgattttatattccaagggacatataagtttaatactttggtcatactgcgattagtatcgaaaacattaa

SEQ ID NO: 884519 - DNA, 75 bp, synthetic construct
  source 1..75: mol_type = other DNA
aaaatggtgatatagggccattacgcccctttacgattaaccttagaactggtcggataagcatggggcatggtc

SEQ ID NO: 884520 - DNA, 75 bp, synthetic construct
  source 1..75: mol_type = other DNA
tgtggattcagatgcgcgataacaacgctatctttgggaaaaatatagttaacactgatagcgcccaggcattgc

SEQ ID NO: 884521 - DNA, 75 bp, synthetic construct
  source 1..75: mol_type = other DNA
tacatgattaataactcaaggacagccaatggcaccgatggtcaggcgtacatggataataacggtaactggctt

SEQ ID NO: 884522 - DNA, 75 bp, synthetic construct
  source 1..75: mol_type = other DNA
caacatacggcagaaacggtggcgcaggcactgaccatcagccgcaccactgccaggcgttatcttgaatattgc

SEQ ID NO: 884523 - DNA, 75 bp, synthetic construct
  source 1..75: mol_type = other DNA
cgctattatgacccgctgcaggggcggtatatcactcaggatccgattgggctggaaggcgggtggaatcagtat

SEQ ID NO: 884524 - DNA, 75 bp, synthetic construct
  source 1..75: mol_type = other DNA
tctacatgattaataactcaaggacagccaatggcaccgatggtcaggcgtacatggataataacgggaactggc

SEQ ID NO: 884525 - DNA, 75 bp, synthetic construct
  source 1..75: mol_type = other DNA
caaacggctgaacaggagtttttaactcgccatcctgatgcggttgtattcagccctaaaaagcgccagtgggga

SEQ ID NO: 884526 - DNA, 75 bp, synthetic construct
  source 1..75: mol_type = other DNA
gctctggatgatcccgcaatggcgcaaaccgtcgccatcgaattacgtaatagcgatcgctcccggctcgcactg

SEQ ID NO: 884527 - DNA, 75 bp, synthetic construct
  source 1..75: mol_type = other DNA
ctgtagaagatgtgcttccagagataaaaaagaaatatgggtttaaaaatgtacaatggagtacaacattaccta

SEQ ID NO: 884528 - DNA, 75 bp, synthetic construct
  source 1..75: mol_type = other DNA
acactatcaataagttggagtcattacctgcgctctgaggcgtttggcattacgttattggaaggcgcacgcttt

SEQ ID NO: 884529 - DNA, 75 bp, synthetic construct
  source 1..75: mol_type = other DNA
gaaaatggcgtgaaacaaacgttaatcgtcagttttgtcggcgactcgagtaccgcgcaggttgatctgcagaag

SEQ ID NO: 884530 - DNA, 75 bp, synthetic construct
  source 1..75: mol_type = other DNA
agtaagtttgttcgcggcgatgccattgccgggatcctcatcatggtcattaacgttgtcggcgggttgctggtc

SEQ ID NO: 884531 - DNA, 75 bp, synthetic construct
  source 1..75: mol_type = other DNA
gctggaacgcctgccgcgctgccatgcttcatagtgccgaacctgtaagccaggcttacaagttgaacgcgctgg

SEQ ID NO: 884532 - DNA, 75 bp, synthetic construct
  source 1..75: mol_type = other DNA
aaaccgcctggcctgccgtaaaaacaacaggacttacaggttgcgtaaccgctccggaaactgaagataaccttc

SEQ ID NO: 884533 - DNA, 75 bp, synthetic construct
  source 1..75: mol_type = other DNA
tccagaggcattttggttgaaaccaacaagcgtcttgagcacaaaatgttctaccgtatagattgtgagcgcctt

SEQ ID NO: 884534 - DNA, 75 bp, synthetic construct
  source 1..75: mol_type = other DNA
taccaataactttgaactgaccgtcaccaataaagccgatctctatacccgcgcgacgtttcatctacaacgttg

SEQ ID NO: 884535 - DNA, 75 bp, synthetic construct
  source 1..75: mol_type = other DNA
agatccttgagttctataaaccagagttccgcgattgcgttaggttggatgctggagaaccgccttttgacgttc

SEQ ID NO: 884536 - DNA, 75 bp, synthetic construct
  source 1..75: mol_type = other DNA
tactgggtatgcttatatttaagccattgcaatatatatatttacctctgttaagtgaaaaaacgttcttgctaa

SEQ ID NO: 884537 - DNA, 75 bp, synthetic construct
  source 1..75: mol_type = other DNA
gattctttgtacggatatggatacagaaccagctgattttgttctttcttccaaagacaaacttatctatgtaca

SEQ ID NO: 884538 - DNA, 75 bp, synthetic construct
  source 1..75: mol_type = other DNA
gtaaaccgggccaggaacgctgtgcaaaaaaatggcgataccttgtccggcggacttacttttgaaaacaactca

SEQ ID NO: 884539 - DNA, 75 bp, synthetic construct
  source 1..75: mol_type = other DNA
tgcgaagtaatgaggttgttgtaagtctttctcttctttctgaggtaagagagttggctggattagctgttgatg

SEQ ID NO: 884540 - DNA, 75 bp, synthetic construct
  source 1..75: mol_type = other DNA
atggccgcgaaggcctcactctcgccagaaggtacgttatgcgtcagtttttttattggcgatgaggcgatattt

SEQ ID NO: 884541 - DNA, 75 bp, synthetic construct
  source 1..75: mol_type = other DNA
ccaggcattaaatgaacctacggtttttgagaaattaaagtcaatgagcgatgcccctttgagtacaatcaaaga

SEQ ID NO: 884542 - DNA, 75 bp, synthetic construct
  source 1..75: mol_type = other DNA
actatcatggacaagactctgttcgtgtaggaagaatttcttttggaagcattaatgcaattctgggaagcgtgg

SEQ ID NO: 884543 - DNA, 75 bp, synthetic construct
  source 1..75: mol_type = other DNA
ttttcggcaaatacagaggggatttcgtacaacactggatgatctcagtgggcgttcttatgtaatgactgctga

SEQ ID NO: 884544 - DNA, 75 bp, synthetic construct
  source 1..75: mol_type = other DNA
cctgatgagtttccttctatgtgcccggtagatggaagagtgcgtgggattacgcacaataaaatattgtgggac

SEQ ID NO: 884545 - DNA, 75 bp, synthetic construct
  source 1..75: mol_type = other DNA
tcatggcgctgtgtgtaagtgtcaacgacggatgaaaagtgatccacttatatctccaccaacggcccaatattg

SEQ ID NO: 884546 - DNA, 75 bp, synthetic construct
  source 1..75: mol_type = other DNA
ctcccggagttcacattcacggttctggtgaccggagacgatcttcagacacagcgaagccgcctgcgtgatgcg

SEQ ID NO: 884547 - DNA, 75 bp, synthetic construct
  source 1..75: mol_type = other DNA
cgggaatggttaaaacaaagactaacggaaaaattctttgatctattatcagatgagtcaattataaaaaaatta

SEQ ID NO: 884548 - DNA, 75 bp, synthetic construct
  source 1..75: mol_type = other DNA
ttcgactccgccgccgctgacgctggcaagccgatcatcaacctttccaatatgtccgccgatggcaagcctaag

SEQ ID NO: 884549 - DNA, 75 bp, synthetic construct
  source 1..75: mol_type = other DNA
cgcatcaggcacctgcgtacaactgccggatgcggcgtgaatgccttatccgtcctacaaaatcgtctcctccgt

SEQ ID NO: 884550 - DNA, 75 bp, synthetic construct
  source 1..75: mol_type = other DNA
taggcatgataagacgcgccagcgtcgcatcaggcacctgcgtacaactgccggatgcggcgtaaacgccttatc

SEQ ID NO: 884551 - DNA, 75 bp, synthetic construct
  source 1..75: mol_type = other DNA
gcgccggacgggaccgcgtggacaccacgcagacgccgcgtaacccggatacaggaacgcattcgcttttatctg

SEQ ID NO: 884552 - DNA, 75 bp, synthetic construct
  source 1..75: mol_type = other DNA
acattagaacaagaagtagaagtactgaaaactcagctattagatcaacaacgtcaaattgatgaactaattggc

SEQ ID NO: 884553 - DNA, 75 bp, synthetic construct
  source 1..75: mol_type = other DNA
cgttctagcgtcaggacgcttcttgaccaagatgcaaatttgcatgttgctcatggtggttcgactccggggaca

SEQ ID NO: 884554 - DNA, 75 bp, synthetic construct
  source 1..75: mol_type = other DNA
gtttacgacagcttatacaccgccattgaaaacaataccccggtgaatttaagccaactggtagagggacaaagc

SEQ ID NO: 884555 - DNA, 75 bp, synthetic construct
  source 1..75: mol_type = other DNA
cgcataactatggggcatggtctggatgttacaggagatataacaactaacgcctgggtgtatgcaaacaggttt

SEQ ID NO: 884556 - DNA, 75 bp, synthetic construct
  source 1..75: mol_type = other DNA
ccttaaatagtcctgcactgaccggaacgccaacaacgccaactgcgccaaaaggtactaataatactcagatcg

SEQ ID NO: 884557 - DNA, 75 bp, synthetic construct
  source 1..75: mol_type = other DNA
atgttggagtagcagaagatctttcattaaaatacggtaatattaaaattatcgaaaattattcgaaaaatttac

SEQ ID NO: 884558 - DNA, 75 bp, synthetic construct
  source 1..75: mol_type = other DNA
tacgggggctttcgtggtggattgctctggcaatttctggaagtccatttaatgccctggcagacgataccattc

SEQ ID NO: 884559 - DNA, 75 bp, synthetic construct
  source 1..75: mol_type = other DNA
tgtgtggagtgttgccgtttagatcggataagacggatacgctgtatcccacaatgagtgcggtgccgaatttgg

SEQ ID NO: 884560 - DNA, 75 bp, synthetic construct
  source 1..75: mol_type = other DNA
cacagccgcaaaattgtcggctggcgggctgatgtatcagaaaacagcgacagtatccgcctgtcactcatggat

SEQ ID NO: 884561 - DNA, 75 bp, synthetic construct
  source 1..75: mol_type = other DNA
atgacagtggggatcgacagccctaatgatattcctgaggggattgcgacgctgggcgcttttatgggttattcc

SEQ ID NO: 884562 - DNA, 75 bp, synthetic construct
  source 1..75: mol_type = other DNA
agcggatgagctggtggcttcatctgatttgacgctggcgtatggtggccaagatattgtggataaataccgttt

SEQ ID NO: 884563 - DNA, 75 bp, synthetic construct
  source 1..75: mol_type = other DNA
cgtttaaagctggcactgcaacagctaccgctggagatgctgccacttgtatcacggcaatcggtagattggttg

SEQ ID NO: 884564 - DNA, 75 bp, synthetic construct
  source 1..75: mol_type = other DNA
agtcgtggtttccccccaaaaaaactgctgaatgaaatgattgagcaggcgtaccaggactttgtggcaaatgag

SEQ ID NO: 884565 - DNA, 75 bp, synthetic construct
  source 1..75: mol_type = other DNA
caaacagcttgaaagtattgcccgcagtcgtggtctccgcccaaaaaaactgctgaatgaaatgattgagcaggc

SEQ ID NO: 884566 - DNA, 75 bp, synthetic construct
  source 1..75: mol_type = other DNA
caaacaccttgaaagtattgcccgtagtcgtggtctcctcccaaaaaaactgctgaatgaaatgattgagcaggc

SEQ ID NO: 884567 - DNA, 75 bp, synthetic construct
  source 1..75: mol_type = other DNA
ctgagcggttttatttctcgcctcgagaatatgtcgaagagcgcgcgggataacgtgcagtttattggcgacatg

SEQ ID NO: 884568 - DNA, 75 bp, synthetic construct
  source 1..75: mol_type = other DNA
tcctgaaaaccagattcaggtttatgtggagaacgaagacggctctcacgttcctgtatcgcaaccaatcatcat

SEQ ID NO: 884569 - DNA, 75 bp, synthetic construct
  source 1..75: mol_type = other DNA
agtcgtggtctcctcccaaaaaaactgctgaatgaaatgattgagcaggcgtaccaggactttgtggcaaatgag

SEQ ID NO: 884570 - DNA, 75 bp, synthetic construct
  source 1..75: mol_type = other DNA
atgcagtcatggaacaaactgctgatgcagtggttgttcctatgaatgcaggttggagtgatgttggatcatggt

SEQ ID NO: 884571 - DNA, 75 bp, synthetic construct
  source 1..75: mol_type = other DNA
accgttgacggggatggtgcgtggcttgttgaacgacggcctggcagtggttggtggttttaaaattggtgatat

SEQ ID NO: 884572 - DNA, 75 bp, synthetic construct
  source 1..75: mol_type = other DNA
tgaacaaagcctccaggcgaaaacgtcagtattaccggcgaatcgattacgccatctgcaatcctcgcggtgtgc

SEQ ID NO: 884573 - DNA, 75 bp, synthetic construct
  source 1..75: mol_type = other DNA
caaacatcttgaaagtattgcccgtagtcgtggtctccccccaaaaaaactgctgaatgaaatgattgagcaggc

SEQ ID NO: 884574 - DNA, 75 bp, synthetic construct
  source 1..75: mol_type = other DNA
caaacaacttgaaagtattgcccggagtcgtggtctccacccaaaaaaactgctgaatgaaatgattgagcaggc

SEQ ID NO: 884575 - DNA, 75 bp, synthetic construct
  source 1..75: mol_type = other DNA
cgcgggatatggacagaatgacctgtggcaagcatccggggatgtttattatcgtcggcggcgtgccggaaacgg

SEQ ID NO: 884576 - DNA, 75 bp, synthetic construct
  source 1..75: mol_type = other DNA
aagtgaacggcactatgaatgagctcagcgcatcctgggatggtctgtggcaacgttcaaaaaacaaggcactta

SEQ ID NO: 884577 - DNA, 75 bp, synthetic construct
  source 1..75: mol_type = other DNA
gagtaaaaaaaacgggagaacacttgcaaatacgacttaaaggtcgtattattgtttcatcgaaaggggaatggc

SEQ ID NO: 884578 - DNA, 75 bp, synthetic construct
  source 1..75: mol_type = other DNA
ttgtcgcagattggcgttcagatccagaaaaacaatgacggctccgttgatacgctgagaacgctggagtcgata

SEQ ID NO: 884579 - DNA, 75 bp, synthetic construct
  source 1..75: mol_type = other DNA
actgggggctgatggtgacagtgccaacgcttccatcgaggggatggctaaaagcctgaaggaggccgccagcgg

SEQ ID NO: 884580 - DNA, 75 bp, synthetic construct
  source 1..75: mol_type = other DNA
aactgtcagacgatgacattggtaattatcagaaaacaattaacgacaataaagatagagtaaaaaaactaattc

SEQ ID NO: 884581 - DNA, 75 bp, synthetic construct
  source 1..75: mol_type = other DNA
ttacaagtcccagaaagtattccagtgttagaaattaaaactaagggggcttatactgtcgccgagtattctaaa

SEQ ID NO: 884582 - DNA, 75 bp, synthetic construct
  source 1..75: mol_type = other DNA
cataaaaaagattgatcatagaactcccccctataaatatttagctttagatgaaaaatcaatattatctgtgaa

SEQ ID NO: 884583 - DNA, 75 bp, synthetic construct
  source 1..75: mol_type = other DNA
tgagatcaccatgatcgacgggaagggagggcgaagggaatacagcgccgaagatggcggaagaataacgttacc

SEQ ID NO: 884584 - DNA, 75 bp, synthetic construct
  source 1..75: mol_type = other DNA
ctcgcacagatcggtgttcagatacagaaaaataatgatggttctgttgatacgctaaaaacattacaggagata

SEQ ID NO: 884585 - DNA, 75 bp, synthetic construct
  source 1..75: mol_type = other DNA
tactcgtgcatatattgactccgtctcaaaagccactggatatggagccaaagagcaagtaaatctgcacgatcc

SEQ ID NO: 884586 - DNA, 75 bp, synthetic construct
  source 1..75: mol_type = other DNA
acgggcggcaattcagacggctatcagtgatccgcgctggtctggtcttcgtgacagccgagtgctcagccagca

SEQ ID NO: 884587 - DNA, 75 bp, synthetic construct
  source 1..75: mol_type = other DNA
actgggtgctgatggcgacagtgcaaattcctccatcgaggggatggctaaaagcctgaaggaggccgccagtgg

SEQ ID NO: 884588 - DNA, 75 bp, synthetic construct
  source 1..75: mol_type = other DNA
gggttagccggtgctgccggctacggactgaaacaggtcgcttatggatttcgggaggcatcccgtcaggcctat

SEQ ID NO: 884589 - DNA, 75 bp, synthetic construct
  source 1..75: mol_type = other DNA
caccgtcggcagaggaaataatgaactgcattaaggatggtatgaccgcagatgattttttatctgccggaatga

SEQ ID NO: 884590 - DNA, 75 bp, synthetic construct
  source 1..75: mol_type = other DNA
ggtacaaaagaatatatggaggaactatgttccaaagataatagagtaaaatattttagaaatgatgttaataaa

SEQ ID NO: 884591 - DNA, 75 bp, synthetic construct
  source 1..75: mol_type = other DNA
tgggcgctgctggcagcgctttgttcctggtgttgcaaaaacgcacttctgactgcgattataagacagtaccct

SEQ ID NO: 884592 - DNA, 75 bp, synthetic construct
  source 1..75: mol_type = other DNA
ggattacaccggcttcagcggccactccgcgctctccgcggccttctggccaatcttcctgtggctgctcagcgc

SEQ ID NO: 884593 - DNA, 75 bp, synthetic construct
  source 1..75: mol_type = other DNA
cagaaagggcgctctccccctggcgagggcataggcttgatgtggcacaaagtagagagagctatgaggcatttt

SEQ ID NO: 884594 - DNA, 75 bp, synthetic construct
  source 1..75: mol_type = other DNA
aagttagtatctatatatctacttttaacaggctagagaaattaaaaagggcgatagattctgtttttgcacaag

SEQ ID NO: 884595 - DNA, 75 bp, synthetic construct
  source 1..75: mol_type = other DNA
gacgttaatgtaaaaagattacaagactgggatacttggttaagattgagtgcaaaatatggtgaatttatggta

SEQ ID NO: 884596 - DNA, 75 bp, synthetic construct
  source 1..75: mol_type = other DNA
ggcaataaagcgccgactcagtccctgctggggcaaattgccaccgcagtaggaccgctggataaaccctttacg

SEQ ID NO: 884597 - DNA, 75 bp, synthetic construct
  source 1..75: mol_type = other DNA
aaatatggaacgcctgccgcgccgccatgcttcagtccggaaactttcgggaaaataaagattcgtcaaccaata

SEQ ID NO: 884598 - DNA, 75 bp, synthetic construct
  source 1..75: mol_type = other DNA
ctcgattagcaacagcggaaaaggcatgacggatagcaacgggactgcaatcgcctccctgaccggcacgttagc

SEQ ID NO: 884599 - DNA, 75 bp, synthetic construct
  source 1..75: mol_type = other DNA
ggtcccgctcatcctgttgcatagcggtaataaagcgccgactcaatccctgctggggcaaatcgccactgcagc

SEQ ID NO: 884600 - DNA, 75 bp, synthetic construct
  source 1..75: mol_type = other DNA
ggcaataaagcgccgactcagtccctgctggggcaaatcgccaccgcgttgggaccactggataaaccctttacg

SEQ ID NO: 884601 - DNA, 75 bp, synthetic construct
  source 1..75: mol_type = other DNA
agggccgctggataaaccctttacgcgtaccgatctacataagcaggctggtgatgctgccaacttactgattta

SEQ ID NO: 884602 - DNA, 75 bp, synthetic construct
  source 1..75: mol_type = other DNA
tgagcttctacgctaccctgaaatagagaaaggcttatcaatcaataaaaaatcaaatttaaggcgtaaaacaac

SEQ ID NO: 884603 - DNA, 75 bp, synthetic construct
  source 1..75: mol_type = other DNA
tgacggtgcattacgggtatgatgagaaaggccgcctgaccggtgagcgccagacggtgcatcacccgcagacgg

SEQ ID NO: 884604 - DNA, 75 bp, synthetic construct
  source 1..75: mol_type = other DNA
agttgctgagctttaccgactgttccggttatgtaacccgttatgaccatgaccgttttggtcaggtgacggcgg

SEQ ID NO: 884605 - DNA, 75 bp, synthetic construct
  source 1..75: mol_type = other DNA
caaccagttaacgtcagccaccgggcctgacgggctggaaatacgccgggaatatgatgaatccggccgtctgat

SEQ ID NO: 884606 - DNA, 75 bp, synthetic construct
  source 1..75: mol_type = other DNA
atggcaataacggtgtcgctcggtttatattatctggaacgatactcttttgcggtatgggccttactggattct

SEQ ID NO: 884607 - DNA, 75 bp, synthetic construct
  source 1..75: mol_type = other DNA
ggtgctggcttacattgtgcgctttgggaatattgctgtaatacaggcactgattgacgctaatctaattgactg

SEQ ID NO: 884608 - DNA, 75 bp, synthetic construct
  source 1..75: mol_type = other DNA
atgtcggtgctggcagatggtgtgctggtggcgatggcgctggccgtactccggcctttactgcgcaaatctgaa

SEQ ID NO: 884609 - DNA, 75 bp, synthetic construct
  source 1..75: mol_type = other DNA
aaagcggaaaggtaaaacgcgtcggtgtatccaaccacaatctggcacaaatcagacgtgccaatgagatcctta

SEQ ID NO: 884610 - DNA, 75 bp, synthetic construct
  source 1..75: mol_type = other DNA
ctattgcgaaaggaacccttccactcattggtgtgactaaagtccatcatgttctggatgctttaagcgcgacag

SEQ ID NO: 884611 - DNA, 75 bp, synthetic construct
  source 1..75: mol_type = other DNA
acatccagttacgcgatgaggaaatcatcctgctggaacaactcgccgcagagaccagagtggatacacgaggcg

SEQ ID NO: 884612 - DNA, 75 bp, synthetic construct
  source 1..75: mol_type = other DNA
ctctccgtgctggcagaagtcgcctctgtacgtctccatcaggatgaggattcatgcctgcccccgtcgtcctga

SEQ ID NO: 884613 - DNA, 75 bp, synthetic construct
  source 1..75: mol_type = other DNA
gttgataagtacctgaaaaaattcaataaaaaagtacgaagtaaccatgatatgtctaattatatatctaagtta

SEQ ID NO: 884614 - DNA, 75 bp, synthetic construct
  source 1..75: mol_type = other DNA
ttgctctgctggcaatcactcgcggtcttcatggcgtcgcccggctcatgcaggggtttgtcccgttgatggcga

SEQ ID NO: 884615 - DNA, 75 bp, synthetic construct
  source 1..75: mol_type = other DNA
ggcgctaaagagtattacagctatgctttcgaatcgaatcgcggcgacgcagtgcacgtagtgaccgagaatagc

SEQ ID NO: 884616 - DNA, 75 bp, synthetic construct
  source 1..75: mol_type = other DNA
tgttcaaggcaaacgtaaacctggcactgatttccaggaaacactcactgatatctatgctgactatgttgctaa

SEQ ID NO: 884617 - DNA, 75 bp, synthetic construct
  source 1..75: mol_type = other DNA
ttgcaggctgaacgtattatacagaaacaacagaccgtggcccgtcagatgggaacagcagagacgaatattctt

SEQ ID NO: 884618 - DNA, 75 bp, synthetic construct
  source 1..75: mol_type = other DNA
atttatcccaaattgatcctgacagcgctttagacttcctattggagcaatgccactctttaagtcgtgatacta

SEQ ID NO: 884619 - DNA, 75 bp, synthetic construct
  source 1..75: mol_type = other DNA
gccatcagtggatctcctgcgcttcgttctggattgcttcagcagtcacacgcagcagttctgccgcttcgacgt

SEQ ID NO: 884620 - DNA, 75 bp, synthetic construct
  source 1..75: mol_type = other DNA
tgttctctggcaagacacacaccccgaaaactgacgatgttctgatcgattacagcactctgttcggtgtgtctc

SEQ ID NO: 884621 - DNA, 75 bp, synthetic construct
  source 1..75: mol_type = other DNA
gtttctgcctttctggcgctttacgcccgcgaacttaatctgatgtcggcggccagtaatttcctgctctgctac

SEQ ID NO: 884622 - DNA, 75 bp, synthetic construct
  source 1..75: mol_type = other DNA
atatctctgaccgcttgcatgcctctcctgataaagccggtttattggtgactttatttttaattgccgccattg

SEQ ID NO: 884623 - DNA, 75 bp, synthetic construct
  source 1..75: mol_type = other DNA
ctggtcacgctgtttggctatagcagaatgacgattaaccgcgcgttgcgagaactgaccgcggagggcttgctg

SEQ ID NO: 884624 - DNA, 75 bp, synthetic construct
  source 1..75: mol_type = other DNA
gccacaggctgcacgttacgcgctccagaccgtcacacacaccgtggcccgagcggcccggaccgtctggtcctt

SEQ ID NO: 884625 - DNA, 75 bp, synthetic construct
  source 1..75: mol_type = other DNA
cccgccaggcggacgccgatcaagcgctccagttggggattgccatcggtgatacgctgttttactcccaaattg

SEQ ID NO: 884626 - DNA, 75 bp, synthetic construct
  source 1..75: mol_type = other DNA
ggggctggcaatggtggtcgggccgtggattggtctgaatatggcgcgctgggaagcctttaatctggctttctg

SEQ ID NO: 884627 - DNA, 75 bp, synthetic construct
  source 1..75: mol_type = other DNA
ccgggattttattcccgacagctgtacgtccggcaccctttttcctttttcacgtagccaggtttccggctgtca

SEQ ID NO: 884628 - DNA, 75 bp, synthetic construct
  source 1..75: mol_type = other DNA
atgaacgtaatagctggggcatgtctgccggactgcaatccgaccgtccggacaatggagcccaggtgagcggta

SEQ ID NO: 884629 - DNA, 75 bp, synthetic construct
  source 1..75: mol_type = other DNA
ttgggaagaaatgacctgcttattcgcaccttccttagtattccgcaagcctggctggcgtggcactcagaaaac

SEQ ID NO: 884630 - DNA, 75 bp, synthetic construct
  source 1..75: mol_type = other DNA
aaactgattttagttccaatattttcgacggtttttcttataccggtgcggcactgaccagcgatgaccggatgt

SEQ ID NO: 884631 - DNA, 75 bp, synthetic construct
  source 1..75: mol_type = other DNA
tttcctgcctgacgatggtaatgccgtccgcgctggcggtcgaatttaacctgagcgtcctcgacaaatcgatgc

SEQ ID NO: 884632 - DNA, 75 bp, synthetic construct
  source 1..75: mol_type = other DNA
cggcgaaacggattttagttccaatattttcgacggtttttcttataccggcgcggcactggcaagtgacgagcg

SEQ ID NO: 884633 - DNA, 75 bp, synthetic construct
  source 1..75: mol_type = other DNA
taaacaaagttgcattattcatctgccagaacgtctggaagacacgaccaaacgcctgattttaccttgtcatta

SEQ ID NO: 884634 - DNA, 75 bp, synthetic construct
  source 1..75: mol_type = other DNA
tgaccgttacggcaggctgacggagaaaaccgacctcatcccggaaggggttatccgcacggatgatgagcggac

SEQ ID NO: 884635 - DNA, 75 bp, synthetic construct
  source 1..75: mol_type = other DNA
cgcctgctggggatcgtagaaactctgcgcaaaggcaaggtgtcgccggatgcggaaccgacgattgtcgatcag

SEQ ID NO: 884636 - DNA, 75 bp, synthetic construct
  source 1..75: mol_type = other DNA
gtacgggtcaggttcgacggtcgttacacactgtttacgccctctgaaaatgacgggcagggaggatatgcgtga

SEQ ID NO: 884637 - DNA, 75 bp, synthetic construct
  source 1..75: mol_type = other DNA
gaccggatgcaccagaaggtagatgatgaggttgttttttgcatgtggtgctgcttttttgtgcgtcgacaggct

SEQ ID NO: 884638 - DNA, 75 bp, synthetic construct
  source 1..75: mol_type = other DNA
aaaaaaatttatcgacataatgaacgaagcaaaagaaaaagatcttgggacttataaaaaatcaacccttaaaac

SEQ ID NO: 884639 - DNA, 75 bp, synthetic construct
  source 1..75: mol_type = other DNA
atcgctggcgatcatggacgttaaccaaaacgcggtggtcagtgcgatggaaaaacatcaagtgcaatggctgat

SEQ ID NO: 884640 - DNA, 75 bp, synthetic construct
  source 1..75: mol_type = other DNA
gcaaacggcttttcgcgtggtactgggtgcctggcatacagaaggttcgatggtgaaagtcacggcggatgacgt

SEQ ID NO: 884641 - DNA, 75 bp, synthetic construct
  source 1..75: mol_type = other DNA
gtggagaaaatgccattgttaacataacccgcaccagcgattcactcgcgcaagttaaccgcggcactattaccg

SEQ ID NO: 884642 - DNA, 75 bp, synthetic construct
  source 1..75: mol_type = other DNA
gccataaacctaaccgatctggataaatatttctgccactggcgcccggttcagggcgccacaatggttgattat

SEQ ID NO: 884643 - DNA, 75 bp, synthetic construct
  source 1..75: mol_type = other DNA
aacgctgctgggggctggtgctcgtggtggcgggcgtctgcgtgattacgtttattatctcgcacctgatccccg

SEQ ID NO: 884644 - DNA, 75 bp, synthetic construct
  source 1..75: mol_type = other DNA
ccttaaatccccacggtcacgtatacttactggatggattgaccaaactccatatttgcaagatttgcggaacct

SEQ ID NO: 884645 - DNA, 75 bp, synthetic construct
  source 1..75: mol_type = other DNA
acccagtgcactatgcggatgccattcgttataatgctcgaacgcctctgcaaggttctttgctgccgttaaccc

SEQ ID NO: 884646 - DNA, 75 bp, synthetic construct
  source 1..75: mol_type = other DNA
gacgtttactatgatggttatgtaggctggaacaactatgccgctgatagttattacaacggcgatggatttgcc

SEQ ID NO: 884647 - DNA, 75 bp, synthetic construct
  source 1..75: mol_type = other DNA
aagcgtactggtgcacatctgagcgcctgaaggctctggccatccagcatctttaccagctggatctggcgcttt

SEQ ID NO: 884648 - DNA, 75 bp, synthetic construct
  source 1..75: mol_type = other DNA
atttaccgcaccctgccgcctgacgaagcgtactggtgcacatctgagcgcctgaaggctctggccatccagcat

SEQ ID NO: 884649 - DNA, 75 bp, synthetic construct
  source 1..75: mol_type = other DNA
cgcaatcactttaaatggtcagccgcttaaagtggggagtgctaatgcaacaactgttgctatggataccaataa

SEQ ID NO: 884650 - DNA, 75 bp, synthetic construct
  source 1..75: mol_type = other DNA
tctacaaaacccaaatgcgaaaacccggcctggtaccgcccggagcattataaaaagctcacggggcagcttggc

SEQ ID NO: 884651 - DNA, 75 bp, synthetic construct
  source 1..75: mol_type = other DNA
atggcttccggccggaaaagcaacgtctgctggatgctatctggccagtgctgatcagtttctgtgatgccggca

SEQ ID NO: 884652 - DNA, 75 bp, synthetic construct
  source 1..75: mol_type = other DNA
acaaaagccaaatgtgagaacccggcctggtatcgcccggagcattataaaaagctctccggacagctcggtcat

SEQ ID NO: 884653 - DNA, 75 bp, synthetic construct
  source 1..75: mol_type = other DNA
gcggctatttgtattttgttttgcaattggtccttcagaaataaaacaatatcaatttgcgtaataattctatta

SEQ ID NO: 884654 - DNA, 75 bp, synthetic construct
  source 1..75: mol_type = other DNA
cgagctgatagcgatgctggtcgaccgtgatttgaataatcagttacgtcgagcctttgcgaaactggagtctta

SEQ ID NO: 884655 - DNA, 75 bp, synthetic construct
  source 1..75: mol_type = other DNA
gtcgtgcaactctccgctaccgtggtctgcctacccgtcacctcctgtccctgctgagacttggagtcgataacc

SEQ ID NO: 884656 - DNA, 75 bp, synthetic construct
  source 1..75: mol_type = other DNA
agacccgccagcaccaatcccgagacgagctaatagcccaactggtcgctatgaaactgtcgtcggctagcaagc

SEQ ID NO: 884657 - DNA, 75 bp, synthetic construct
  source 1..75: mol_type = other DNA
tctaccagagaatttcgcacaatttgatgagattgctactttctttagtcaacggcatcagccaaaaaataaaca

SEQ ID NO: 884658 - DNA, 75 bp, synthetic construct
  source 1..75: mol_type = other DNA
atgccaactatcaaagacatagcaagaattgccggtgtgtcgcatgggactgtctcaaatgtgctcaatggcaga

SEQ ID NO: 884659 - DNA, 75 bp, synthetic construct
  source 1..75: mol_type = other DNA
acagtgccatcagcaacggcggcaccggcacgcaggttaacggcgacgaagccaccgtaaacaataacggtaaaa

SEQ ID NO: 884660 - DNA, 75 bp, synthetic construct
  source 1..75: mol_type = other DNA
gaggggggcttatacgatcgacgttttgctgctattgcctttaagcaagctcagggagacattgccgaagcggta

SEQ ID NO: 884661 - DNA, 75 bp, synthetic construct
  source 1..75: mol_type = other DNA
catcgcagcgctgggattgctgctggatcgcggggcgcgtaagctgtttatcgcgctggcctgggttgcggcggc

SEQ ID NO: 884662 - DNA, 75 bp, synthetic construct
  source 1..75: mol_type = other DNA
aaactcgaaatcacgcatggcggtcgtcttacagcatcaaaggatgtgctcattggttttactggaagtacaggg

SEQ ID NO: 884663 - DNA, 75 bp, synthetic construct
  source 1..75: mol_type = other DNA
cggataaccgaccgttttattctcgtaatgagctaatagaaagattggttatccgtgatatggaatttaaccgag

SEQ ID NO: 884664 - DNA, 75 bp, synthetic construct
  source 1..75: mol_type = other DNA
aacgctcttcttatatcggcacacagatggtggtcaccttcgcgctcgccacgctcgaaaacgtttttggcccag

SEQ ID NO: 884665 - DNA, 75 bp, synthetic construct
  source 1..75: mol_type = other DNA
cgttatctttgtgtgatgcccaggactggcaattacatcttaacgagttacgtaaagctagcaaaggtacgcatc

SEQ ID NO: 884666 - DNA, 75 bp, synthetic construct
  source 1..75: mol_type = other DNA
aacagtttccattgcggcgacttatacaataatgggatattttttacctgttcatctgaaacaattttcaagaat

SEQ ID NO: 884667 - DNA, 75 bp, synthetic construct
  source 1..75: mol_type = other DNA
attcgctcaaaatctggcgttgatttaacagatgagggaagactgttcttatacaatgcctacaatattatccgg

SEQ ID NO: 884668 - DNA, 75 bp, synthetic construct
  source 1..75: mol_type = other DNA
attatattaaatatgctttaagcatggcgacaggtgatggtagaaacaattataatttaaaagatttcaataatg

SEQ ID NO: 884669 - DNA, 75 bp, synthetic construct
  source 1..75: mol_type = other DNA
cagtaatattttccgcatcaatagcgattgcaccgatggcaataatattgccacttcaaagtttagtattattca

SEQ ID NO: 884670 - DNA, 75 bp, synthetic construct
  source 1..75: mol_type = other DNA
tgcgtatatatttctgatagcagtaagtatattattgctattgatatcatttctattggttttttctattaacct

SEQ ID NO: 884671 - DNA, 75 bp, synthetic construct
  source 1..75: mol_type = other DNA
atagggatagcaatgttcatagatttatacattgattcaaagataaccaaatttcacaaacttgaaattgataaa

SEQ ID NO: 884672 - DNA, 75 bp, synthetic construct
  source 1..75: mol_type = other DNA
gttcttcctttccaccgcgctgccctgcaggagccggatttcattaccgcgcctttttctgtgcatacacgctgg

SEQ ID NO: 884673 - DNA, 75 bp, synthetic construct
  source 1..75: mol_type = other DNA
cgtttcaagggtgcccacgggcagaactttgcccgctggcagatggacggctggcgaaacaatgcagaaaccgcg

SEQ ID NO: 884674 - DNA, 75 bp, synthetic construct
  source 1..75: mol_type = other DNA
gatattactaccgtcgtttatgtctcaactcccgaatttattctgaataatattggattgttttcagggaatgtt

SEQ ID NO: 884675 - DNA, 75 bp, synthetic construct
  source 1..75: mol_type = other DNA
cagctctatgcgccctgcgctggtcgaattactcttcgggccgctgctggtgagatggtgacggcagggacaatg

SEQ ID NO: 884676 - DNA, 75 bp, synthetic construct
  source 1..75: mol_type = other DNA
aacaacgtcagcgtattcatgatgcagccagagagttgtgtcgcgaagcagcgtactgcggcgctggtaccgtcg

SEQ ID NO: 884677 - DNA, 75 bp, synthetic construct
  source 1..75: mol_type = other DNA
cattgaagcgcaggtgctggcagacaaatatggcaacgtacaggtgctaggcacgcgcgattgttcgttacagcg

SEQ ID NO: 884678 - DNA, 75 bp, synthetic construct
  source 1..75: mol_type = other DNA
tatctgaaattcaatcgagatatagcctattagaagaacgttaccattccgacctgaagcggttggattttattt

SEQ ID NO: 884679 - DNA, 75 bp, synthetic construct
  source 1..75: mol_type = other DNA
ctctggattgatcctaatgcctttggtgcggccaagtttagtgggattttaaaaaatatagcgatgaattatgca

SEQ ID NO: 884680 - DNA, 75 bp, synthetic construct
  source 1..75: mol_type = other DNA
gggataaactatcaggcattatatacaacatcgaaaattcgattatatcgggtcatgaatcatttgatataatac

SEQ ID NO: 884681 - DNA, 75 bp, synthetic construct
  source 1..75: mol_type = other DNA
gacgatagatgattatttcaaacccgttgagacaaaagttgtcagagatacatttaaaatttttaaaagatatca

SEQ ID NO: 884682 - DNA, 75 bp, synthetic construct
  source 1..75: mol_type = other DNA
atgtcttatataagggaaaccatcagaggaaaagatgaatggactgtttatgaacagatcggttttgcggtcagt

SEQ ID NO: 884683 - DNA, 75 bp, synthetic construct
  source 1..75: mol_type = other DNA
ccagtcagatccacgcccggtttatgcgttatataccgaaaaagataagctgccgctgaaggtacaggtcgtgat

SEQ ID NO: 884684 - DNA, 75 bp, synthetic construct
  source 1..75: mol_type = other DNA
aataacattctacatttcgaatccgacattaatggagatgttgaatttgaggtgagaaatctttatctcgtgatt

SEQ ID NO: 884685 - DNA, 75 bp, synthetic construct
  source 1..75: mol_type = other DNA
ttcttccgctattaagtggtgtccaacgagtttgcctggacgaattaattcgtcttgacccaaggacatttgata

SEQ ID NO: 884686 - DNA, 75 bp, synthetic construct
  source 1..75: mol_type = other DNA
atgggatacacccagttcaccaaatacgtcacacgatacatcaagcaaggtcagccaatcctcgctccctacaag

SEQ ID NO: 884687 - DNA, 75 bp, synthetic construct
  source 1..75: mol_type = other DNA
caaccacggctcgaatgggagggattatctacccgtacgctggccgaactttgtagagaaattgaaactgtttta

SEQ ID NO: 884688 - DNA, 75 bp, synthetic construct
  source 1..75: mol_type = other DNA
cagtatcgattttccgattcgtttggtggtaacccaccattatattcgtgcggtcttagtgcgctgtaatatcca

SEQ ID NO: 884689 - DNA, 75 bp, synthetic construct
  source 1..75: mol_type = other DNA
atgatagtgttcaattattggggtggcgtaatgatacacctattttacttaatgctatggatatctttgtattac

SEQ ID NO: 884690 - DNA, 75 bp, synthetic construct
  source 1..75: mol_type = other DNA
gttgatacggaaaaattcagaccatatgctaaaaatgataaggaactttgccggcgtaatatatacaatatttgc

SEQ ID NO: 884691 - DNA, 75 bp, synthetic construct
  source 1..75: mol_type = other DNA
acgttcgtcatccccatgccaaagagctggagtaagacgaagcgggagaaatacgccgggcagccacatcagcag

SEQ ID NO: 884692 - DNA, 75 bp, synthetic construct
  source 1..75: mol_type = other DNA
tccaccgcgaggaaggcatcagcctttaccgccgctatgacaaccgtggccggttaatctcggtgaaagacgcac

SEQ ID NO: 884693 - DNA, 75 bp, synthetic construct
  source 1..75: mol_type = other DNA
gccaccgacccggcgggaaaccggctgccggacccggagctacacccggacagcacgctcacggcgtggccggat

SEQ ID NO: 884694 - DNA, 75 bp, synthetic construct
  source 1..75: mol_type = other DNA
attttagttcgcatccagaaatactcttcaatttcgatcaagccaatcagcaactcaatatcaccattccgcaag

SEQ ID NO: 884695 - DNA, 75 bp, synthetic construct
  source 1..75: mol_type = other DNA
aacagatgcgacgggcagcacccggcagatgacgtggagccgctacgggcagttgctggcgttcaccgactgctc

SEQ ID NO: 884696 - DNA, 75 bp, synthetic construct
  source 1..75: mol_type = other DNA
tggaatgacaatggcgacctggtgcgcatcagcggcccgcgacagacgcgggaatatggctacagcgccacgggc

SEQ ID NO: 884697 - DNA, 75 bp, synthetic construct
  source 1..75: mol_type = other DNA
gggctgacgcgcagtatggaatacgaccttgccggacgcatcaccacgctgaccaacgagaacggcagccggagt

SEQ ID NO: 884698 - DNA, 75 bp, synthetic construct
  source 1..75: mol_type = other DNA
cagcagctaccgcccacaggatggcagcagcagcactaatcttaacgcctacggaacagccggaattaacgcggg

SEQ ID NO: 884699 - DNA, 75 bp, synthetic construct
  source 1..75: mol_type = other DNA
caactgaatatcactattccgcaagcctggctggcgtggcattcagaaaactggatgcccccctccacatggaaa

SEQ ID NO: 884700 - DNA, 75 bp, synthetic construct
  source 1..75: mol_type = other DNA
gtgacggaagaagatggtcgggtgaacaatttccaggtttcggcagcatcgacgcccttcctgactcgccaggga

SEQ ID NO: 884701 - DNA, 75 bp, synthetic construct
  source 1..75: mol_type = other DNA
gtccgcgctggcggtcgaatttaacctgagcgtcctcgacaaatcgatgcgtgatagcattgatatttcattatt

SEQ ID NO: 884702 - DNA, 75 bp, synthetic construct
  source 1..75: mol_type = other DNA
ccactaaacctcaatctttacgccaacctgctgcatcaaacctggtggaatgcagacgcctccacgaccgccaac

SEQ ID NO: 884703 - DNA, 75 bp, synthetic construct
  source 1..75: mol_type = other DNA
tcgaattcaacctgaatgtcctcgataaatcgatgcgagatcgcattgatatttcattattaaaggaaaaagggg

SEQ ID NO: 884704 - DNA, 75 bp, synthetic construct
  source 1..75: mol_type = other DNA
gatgtcgctgtcgcgtaaaccggaggtgacgtggtacggatgggacggcgaccggctgacgacggtacagaccga

SEQ ID NO: 884705 - DNA, 75 bp, synthetic construct
  source 1..75: mol_type = other DNA
cgccagattatccgtgcgggcttagaagatcactttatgggcaagctgagcggcatctctatgggctgtgactgc

SEQ ID NO: 884706 - DNA, 75 bp, synthetic construct
  source 1..75: mol_type = other DNA
aggcactcactgacgccgtaccacagctaaaaaacaaccccgaaatgatgcgtatctttgccgatgagggaaata

SEQ ID NO: 884707 - DNA, 75 bp, synthetic construct
  source 1..75: mol_type = other DNA
gcgtgaaatgctgctggccgccgggcacggctgtatctcctgcggaaccaagactgcgtttgcctggcatgccgg

SEQ ID NO: 884708 - DNA, 75 bp, synthetic construct
  source 1..75: mol_type = other DNA
tctccggatcgatacctcgcccgtcatcgccttgttcaacgttggcggcgagttttatgccattaacgatcgttg

SEQ ID NO: 884709 - DNA, 75 bp, synthetic construct
  source 1..75: mol_type = other DNA
ctgtgctctggctgataaatacaaccccggactgaatgctgccagttatgaagtttataataaattcgctattag

SEQ ID NO: 884710 - DNA, 75 bp, synthetic construct
  source 1..75: mol_type = other DNA
gctggctggtaaatacagtccggggctgaatgctgccagttatgaagtttataataaatttgccattagccggag

SEQ ID NO: 884711 - DNA, 75 bp, synthetic construct
  source 1..75: mol_type = other DNA
agcttcgaacagctgatcaaagaggtggtggaaggtggggatttgtttggtgaaggccacgttgatggtctgaga

SEQ ID NO: 884712 - DNA, 75 bp, synthetic construct
  source 1..75: mol_type = other DNA
tgaaaaagagattagagattacgggttaaatatgttcggtatgtacggcagaaaagtaaagttatcccattctga

SEQ ID NO: 884713 - DNA, 75 bp, synthetic construct
  source 1..75: mol_type = other DNA
ggacggcgaatggcaaaacgggtctggcggcgggagcgtgacctgacggggtggatgtcgctgtcgcgtaaaccg

SEQ ID NO: 884714 - DNA, 75 bp, synthetic construct
  source 1..75: mol_type = other DNA
gacgctgagttttgggggtatatggaagatacgttaacgctgaatggtcggacatttaatcgcccgaaacttttt

SEQ ID NO: 884715 - DNA, 75 bp, synthetic construct
  source 1..75: mol_type = other DNA
ctacgatatatttgtccagaatgacgattcgtatactttggatgagcgaacaaaagaagggactatgcctgtcat

SEQ ID NO: 884716 - DNA, 75 bp, synthetic construct
  source 1..75: mol_type = other DNA
accaataccagcgatgaaggacgtgatacctttttacgtcgcttcgcactgaacagtttcggcagtaaaaacttc

SEQ ID NO: 884717 - DNA, 75 bp, synthetic construct
  source 1..75: mol_type = other DNA
tgacagaagcgggagaacggctgcataaatcgctgtcattacctttatccggtattgaggcagcgttcgaagaga

SEQ ID NO: 884718 - DNA, 75 bp, synthetic construct
  source 1..75: mol_type = other DNA
ggcgtatcaggcgactgccggaagaggaactgccgggtggaacgatgaaagaagcggatattgatccctggcaga

SEQ ID NO: 884719 - DNA, 75 bp, synthetic construct
  source 1..75: mol_type = other DNA
cgatcattatggggcgtacctaccaccaggaaaaccgcacacccggtagcctgccggggacgaagacgcagatga

SEQ ID NO: 884720 - DNA, 75 bp, synthetic construct
  source 1..75: mol_type = other DNA
gtggcacaggcgtgggcaggcaccgggtttggtaacctggcgataccgcgtgtgggtcaggaggtcattgtggac

SEQ ID NO: 884721 - DNA, 75 bp, synthetic construct
  source 1..75: mol_type = other DNA
gtccgtagcgttgagcaggttaaccgctacagaacggctttggctttagccagagcaaatgttcagcaagtgaaa

SEQ ID NO: 884722 - DNA, 75 bp, synthetic construct
  source 1..75: mol_type = other DNA
acctgtttgtgatacctctttgccgggaatgccatcaggcattgcacaacgacagaaaggcatgggaggagaaga

SEQ ID NO: 884723 - DNA, 75 bp, synthetic construct
  source 1..75: mol_type = other DNA
ccgtcatcaggacagggactggcgggagaagaggaactgaaggatttttttgcagatgacagggtgataaagcgt

SEQ ID NO: 884724 - DNA, 75 bp, synthetic construct
  source 1..75: mol_type = other DNA
tatggggattttgctttcagttcctgacctgaatgatattgaaaaaataacgtatataaaagcaggcaggaagtt

SEQ ID NO: 884725 - DNA, 75 bp, synthetic construct
  source 1..75: mol_type = other DNA
cgaatattaatgcggaggctaaagcaagaattaaattacgagggaaaagatttcttgaggatatggttggtagaa

SEQ ID NO: 884726 - DNA, 75 bp, synthetic construct
  source 1..75: mol_type = other DNA
gtacgacaatgcttatcgccgaaggattaatgaccgccaaaaatatcacggtgattaccaacagtctcccggcag

SEQ ID NO: 884727 - DNA, 75 bp, synthetic construct
  source 1..75: mol_type = other DNA
aaacttgattatcgtattcagggttatgcaggtagtcggggcttgatatatacgagatatgccgatgatctcacc

SEQ ID NO: 884728 - DNA, 75 bp, synthetic construct
  source 1..75: mol_type = other DNA
ctgtggctgcttctgcagcaatatccggttctgccatggcgtggactccgaatggcagcggtggttctgttgaac

SEQ ID NO: 884729 - DNA, 75 bp, synthetic construct
  source 1..75: mol_type = other DNA
gacctgaatgatattgaaaaaataacgtatataaaagcaggcaggaagtttctggcgcaaatggatagaagacaa

SEQ ID NO: 884730 - DNA, 75 bp, synthetic construct
  source 1..75: mol_type = other DNA
aggcagaggaaaagaacactgaatattgacggtcgctggtattgtcaggagggggatccggtacactttgcggca

SEQ ID NO: 884731 - DNA, 75 bp, synthetic construct
  source 1..75: mol_type = other DNA
tagggattgttgctgattggtttgttacattcgcagggtctgaaaaagttgttgctgagctcataaaaatcttcc

SEQ ID NO: 884732 - DNA, 75 bp, synthetic construct
  source 1..75: mol_type = other DNA
aagaatcgacttgattgttgaggcatttagcaaaatgcccaacaagaaattagttgttattggtgatggtagtga

SEQ ID NO: 884733 - DNA, 75 bp, synthetic construct
  source 1..75: mol_type = other DNA
gaggattgatttgatcgttgaggccttttcggaaatgcccaatcgaaaattggttgtgattggggatggtcccga

SEQ ID NO: 884734 - DNA, 75 bp, synthetic construct
  source 1..75: mol_type = other DNA
aatggatttaatagttgaagctttcagtcacatgcctgataaaaaattaatagtaataggtgatgggcctgagat

SEQ ID NO: 884735 - DNA, 75 bp, synthetic construct
  source 1..75: mol_type = other DNA
aaagggggggtattagagactattcgtccatacggtgtgcagaatccaacggggcttttctttgataaccaaaag

SEQ ID NO: 884736 - DNA, 75 bp, synthetic construct
  source 1..75: mol_type = other DNA
tcgctgattggtttattacatatgctggttcagaaaaagttgttgcagagtttataaaagttttccctgaggcag

SEQ ID NO: 884737 - DNA, 75 bp, synthetic construct
  source 1..75: mol_type = other DNA
aacaatgaacaacacctgagttatataatgtatttccttgcaggatttcttgtcgctacaatcaagagcaacaag

SEQ ID NO: 884738 - DNA, 75 bp, synthetic construct
  source 1..75: mol_type = other DNA
agcaatgtaaaacgcgccatatatctaacaggagagttatctgttggggtcttttttatgctgtctgctttttta

SEQ ID NO: 884739 - DNA, 75 bp, synthetic construct
  source 1..75: mol_type = other DNA
ggcaggtatcattgcgccggttatgtacaaatatgtcgaaagtcgcagcatcatacataagcgtcctcaacttca

SEQ ID NO: 884740 - DNA, 75 bp, synthetic construct
  source 1..75: mol_type = other DNA
tgtagggcctatggatggataaaaaactttcttgtaaaaaatcataaaaaactcaaaggagtggcgattctttca

SEQ ID NO: 884741 - DNA, 75 bp, synthetic construct
  source 1..75: mol_type = other DNA
tccgcgaccgtctggcggctaatggcaagaaaggaaaggcgattctcggcgcgatgatgcgcaagctggcacagg

SEQ ID NO: 884742 - DNA, 75 bp, synthetic construct
  source 1..75: mol_type = other DNA
taatgtatttccttgcaggatttcttgtcgctacaatcaagagcaacaagcgcccatcagatataatctgcgctt

SEQ ID NO: 884743 - DNA, 75 bp, synthetic construct
  source 1..75: mol_type = other DNA
ttactgcccgcgctgtgccggataaaagcgtatcagatgattttatacatgctgttctcagtaactgcaccacaa

SEQ ID NO: 884744 - DNA, 75 bp, synthetic construct
  source 1..75: mol_type = other DNA
gggtgagcagacttaccggtatgtgcctaatcctctgggttggattgaccagtatggacttgctggttgccccag

SEQ ID NO: 884745 - DNA, 75 bp, synthetic construct
  source 1..75: mol_type = other DNA
ttacaggaaataaagaagaactcttactgctggatctatcccataataaactagcaagtttacacaatgccctga

SEQ ID NO: 884746 - DNA, 75 bp, synthetic construct
  source 1..75: mol_type = other DNA
aaaatattctttagcaacttctgcaatattcagacattaaacgctgcgaacaatcagttggaaaaaataaacctt

SEQ ID NO: 884747 - DNA, 75 bp, synthetic construct
  source 1..75: mol_type = other DNA
atggctgttcgcgggttcgctgcgggaggagagcggctggcggagctgctgacgctgctgcacacggcgaggctg

SEQ ID NO: 884748 - DNA, 75 bp, synthetic construct
  source 1..75: mol_type = other DNA
agaagcagtagtgcggcaggcgagaaagccactgcgctgggcaacgcagctaaagctactgagattatgagtatt

SEQ ID NO: 884749 - DNA, 75 bp, synthetic construct
  source 1..75: mol_type = other DNA
aagacatcgatattattggaaaatatatagaacaaacattaatatttttggttaaaaatgaaacatcgtataatt

SEQ ID NO: 884750 - DNA, 75 bp, synthetic construct
  source 1..75: mol_type = other DNA
atgaacatgcgtaatattaatgttattacagccctctctgtgccgggtaaaaccgtgtcagatgattttatgcat

SEQ ID NO: 884751 - DNA, 75 bp, synthetic construct
  source 1..75: mol_type = other DNA
ttaatatataaagtaaatataattaatgctagttcaaaaaagatgttttttatgaaagcccaacatcaacccaca

SEQ ID NO: 884752 - DNA, 75 bp, synthetic construct
  source 1..75: mol_type = other DNA
atgaatcgcaaaatctcatttcgtggttcctctttgctgacaatcattaatagcattgcagttacagatttactg

SEQ ID NO: 884753 - DNA, 75 bp, synthetic construct
  source 1..75: mol_type = other DNA
gtgagcggtaaacaggcgctgtttgtgaatgaaggctttactacgcgaattgtcgatgtcagcgagaaagagagc

SEQ ID NO: 884754 - DNA, 75 bp, synthetic construct
  source 1..75: mol_type = other DNA
atggcagaagagttcacccaattaatatctaaatcagcaggggttgatgatattcaaatggaaatagacgagaga

SEQ ID NO: 884755 - DNA, 75 bp, synthetic construct
  source 1..75: mol_type = other DNA
aaaacaatatgaaacaactaacgcagaggaagattcccatgacaacagcagaattcaggaaggagatgaaatctc

SEQ ID NO: 884756 - DNA, 75 bp, synthetic construct
  source 1..75: mol_type = other DNA
gaacttctggataagtttttcattgatgttaaaattgatcctgtgtctgaacaaggaaatatcaaagaaaaaaag

SEQ ID NO: 884757 - DNA, 75 bp, synthetic construct
  source 1..75: mol_type = other DNA
gaactgcagttacaggtcagccagcagggcaaccaactgacactgaaaaatcctaccgcgtattatctgaccatt

SEQ ID NO: 884758 - DNA, 75 bp, synthetic construct
  source 1..75: mol_type = other DNA
cgcgaaacgctatttttctacaatatgcgtgaaattcctcccgccccggaaaaaaacagcgaccatgccgttctg

SEQ ID NO: 884759 - DNA, 75 bp, synthetic construct
  source 1..75: mol_type = other DNA
tggaaaggaagctattttctgtcctgaatcatgagtatactgcaaagaaagatattgtggtcatgaaaagggata

SEQ ID NO: 884760 - DNA, 75 bp, synthetic construct
  source 1..75: mol_type = other DNA
tctgcgaattattacgctgttaattgatggcgaccggaatgagttgtcgaacctattagatactgcgtttgagat

SEQ ID NO: 884761 - DNA, 75 bp, synthetic construct
  source 1..75: mol_type = other DNA
tatggaagagaaaaaactagctagattaaagggagtaaagacacattcaacctctatgttctcaaaagggtttat

SEQ ID NO: 884762 - DNA, 75 bp, synthetic construct
  source 1..75: mol_type = other DNA
attttttaaggcacttaaatttacaaccattaacaaacctacaattacctttaaaaacaaaagaaaacaaaaaaa

SEQ ID NO: 884763 - DNA, 75 bp, synthetic construct
  source 1..75: mol_type = other DNA
acaaaatcatcacaactgggctgcctgcgcgcggatgctggaaaccgacgtcgccaacctgcatcggctggcgaa

SEQ ID NO: 884764 - DNA, 75 bp, synthetic construct
  source 1..75: mol_type = other DNA
ggggcgatgatgtcattctgctggcggggtatttctgcgagcagtgtcgtttgcggctggggctctcccgcgtgg

SEQ ID NO: 884765 - DNA, 75 bp, synthetic construct
  source 1..75: mol_type = other DNA
atcaaagctattattacacctttgtaaaaccaggtgaaacaaccccaactcctgtaacgaacgccattataccgc

SEQ ID NO: 884766 - DNA, 75 bp, synthetic construct
  source 1..75: mol_type = other DNA
tcggtagttatgccgtgttaattgatagcaacaacattagtgccagcaatggtagccagacgttagctgtatcaa

SEQ ID NO: 884767 - DNA, 75 bp, synthetic construct
  source 1..75: mol_type = other DNA
tggtgtaaaatataccttaaatggcggaggttatattagccagacaacgcgcttattcggcttagggaaaacaaa

SEQ ID NO: 884768 - DNA, 75 bp, synthetic construct
  source 1..75: mol_type = other DNA
cgcacatttggtccctatgtggatggacactctattacagttttattaatcatggtaaagagagtgtggttcttg

SEQ ID NO: 884769 - DNA, 75 bp, synthetic construct
  source 1..75: mol_type = other DNA
gagctgttagacaattcccagcagttgatccatgaagcgcggaaactgacgcctccgcagattagcacgctgatg

SEQ ID NO: 884770 - DNA, 75 bp, synthetic construct
  source 1..75: mol_type = other DNA
gtgcagagggggcaggcataccgcgataacgtcgcccgaatcattaaaaacgcaatgctggatatcggcctggct

SEQ ID NO: 884771 - DNA, 75 bp, synthetic construct
  source 1..75: mol_type = other DNA
gcttcaggcagcggcattttctcaactgtcagattctgacccatcaaaatctgacgcatcaaaatctgacccgtc

SEQ ID NO: 884772 - DNA, 75 bp, synthetic construct
  source 1..75: mol_type = other DNA
taagaacgaaattgttgttcaaacctcatgcgcaaatatgtttggatgcattcctagcgctgtagagcaaactgc

SEQ ID NO: 884773 - DNA, 75 bp, synthetic construct
  source 1..75: mol_type = other DNA
tcagcggcgggggccacggcattgatatcaccggtgacagcgcgacggtggataacaagggcaccatgaccgtta

SEQ ID NO: 884774 - DNA, 75 bp, synthetic construct
  source 1..75: mol_type = other DNA
cctggcaggaagtaaaaggcagcgacgatgcctggttttacaccgtttttcagcttagtggtcaggcaataatgg

SEQ ID NO: 884775 - DNA, 75 bp, synthetic construct
  source 1..75: mol_type = other DNA
tcaggtatgcggaaattttaccggacgcctgctgactgagcgttacacgggtgtactggacacgcattttgccaa

SEQ ID NO: 884776 - DNA, 75 bp, synthetic construct
  source 1..75: mol_type = other DNA
catcagtttgtttgccgcaattcttcgtctagacgttttttcaaaagttggcgtttttttcgccggcactatggt

SEQ ID NO: 884777 - DNA, 75 bp, synthetic construct
  source 1..75: mol_type = other DNA
gtatgtgatcccaaacataagcacgggaatgatagccgctatcaggctggtgggcaatgtaattaccctttgggt

SEQ ID NO: 884778 - DNA, 75 bp, synthetic construct
  source 1..75: mol_type = other DNA
ggattttctgaccagagtcatttttcaacggtatttaagcaacgctttgggatgacgccaggcgctgagagatcc

SEQ ID NO: 884779 - DNA, 75 bp, synthetic construct
  source 1..75: mol_type = other DNA
ttcatcagcgggaatctgttcaacctcgccgtgaacgtcagtttcaaaaagtggttacgttgatagacgataata

SEQ ID NO: 884780 - DNA, 75 bp, synthetic construct
  source 1..75: mol_type = other DNA
gtttcacatcctgatagctgtgttgggctgaaagcattttctgtcgcgctaatagtgatgctaggtgttatagtg

SEQ ID NO: 884781 - DNA, 75 bp, synthetic construct
  source 1..75: mol_type = other DNA
cgctgatgatgaatcccatcggtctcgttatcaccgctgtcgcggcagcagcttaccttatctaccgcaactggg

SEQ ID NO: 884782 - DNA, 75 bp, synthetic construct
  source 1..75: mol_type = other DNA
cggtatcaaaatcaaatgggggtcgctcaaatccagtgtaaccggaatgggtgacagcatcagtagctggtttaa

SEQ ID NO: 884783 - DNA, 75 bp, synthetic construct
  source 1..75: mol_type = other DNA
cgactgaccagcggaggactgaaactcagcaaagttctggcgggcagcctcgttcgcggttttatgagcgctgca

SEQ ID NO: 884784 - DNA, 75 bp, synthetic construct
  source 1..75: mol_type = other DNA
gaggcgcatcgaaatttatgccactgccgcgccgatgaatgctcagaaacagccaggtgatgtctccaggcagaa

SEQ ID NO: 884785 - DNA, 75 bp, synthetic construct
  source 1..75: mol_type = other DNA
acaacccgtaaactcgcccagaagctaggtgtagagcagcctacattgtattggcatgtaaaaaataagcgggct

SEQ ID NO: 884786 - DNA, 75 bp, synthetic construct
  source 1..75: mol_type = other DNA
tcgttttaacagaagctggaaagatattctcggtccattcacgtatgattcttgaagagattgaaactgcagctc

SEQ ID NO: 884787 - DNA, 75 bp, synthetic construct
  source 1..75: mol_type = other DNA
cgagttaggtgcgccaccacatgtggttgaaaagttattagggcatcatatgtccggcgtaatggctcgttataa

SEQ ID NO: 884788 - DNA, 75 bp, synthetic construct
  source 1..75: mol_type = other DNA
attgcgctgcagcagcttaactactggctgcaggagactaactcagggctggagcgtgacggcgtacgctggatc

SEQ ID NO: 884789 - DNA, 75 bp, synthetic construct
  source 1..75: mol_type = other DNA
atttaggtcgcgggtataattttgctaacgccggaacaattaatgttcagggtgatggttcagttgctattagcg

SEQ ID NO: 884790 - DNA, 75 bp, synthetic construct
  source 1..75: mol_type = other DNA
acaaaaccccggctgggggaacagtccggggtttttagttttcacgtcaaaggggaaattgtgattagtgagtag

SEQ ID NO: 884791 - DNA, 75 bp, synthetic construct
  source 1..75: mol_type = other DNA
ggcgtcagtgtatggctgataattacgatcactcttatgaaatgggaaagcagactattaataaatacttcactt

SEQ ID NO: 884792 - DNA, 75 bp, synthetic construct
  source 1..75: mol_type = other DNA
ggtttgatctgcatcacgaacttgacacgagctatttctcatttggggattatcttcggaagaaagaccaagaca

SEQ ID NO: 884793 - DNA, 75 bp, synthetic construct
  source 1..75: mol_type = other DNA
tataaaaatgagaaagggagaattttatggaaaaaaaaatatattaaggaagaggcgaaatatatcgaattatat

SEQ ID NO: 884794 - DNA, 75 bp, synthetic construct
  source 1..75: mol_type = other DNA
tcaggacagcgacggcgattacatcatggcgatgcttgagcaatatcacgtcaatcgtcagcatgtgcagcgcac

SEQ ID NO: 884795 - DNA, 75 bp, synthetic construct
  source 1..75: mol_type = other DNA
cagtactgtaatggagtttcggaagcataaccgtgtggtggatgctgtgctgttaacctgtccggggatatcggc

SEQ ID NO: 884796 - DNA, 75 bp, synthetic construct
  source 1..75: mol_type = other DNA
gtgaaaatcctgtatcaggattacggcccggtggggcaggtggttatcagcagtactgtaatggagtttcggaag

SEQ ID NO: 884797 - DNA, 75 bp, synthetic construct
  source 1..75: mol_type = other DNA
gttgcgtcatctggattatctggtgattaacgaactggaggctggggaatttagcgggctggagattcgtttgcc

SEQ ID NO: 884798 - DNA, 75 bp, synthetic construct
  source 1..75: mol_type = other DNA
ccaccagattatccagtggccggagcgcggctggctggcggagatcacccacagcgaacgctctaccggcggcgc

SEQ ID NO: 884799 - DNA, 75 bp, synthetic construct
  source 1..75: mol_type = other DNA
tgaatgctgggcgctaactgagagcatcaaactggcacatgcctgcgcgcgggcaagcctgttatgcgctaatgc

SEQ ID NO: 884800 - DNA, 75 bp, synthetic construct
  source 1..75: mol_type = other DNA
cggaattgggggcttactatacccccccacctttggtagcgcgtctcttggacctggctgaaaagtctggtgttg

SEQ ID NO: 884801 - DNA, 75 bp, synthetic construct
  source 1..75: mol_type = other DNA
tggggtctttgacgatgttctccaggaaacaatgttgacagcattcaaggcgggagaacataaagttcgggccca

SEQ ID NO: 884802 - DNA, 75 bp, synthetic construct
  source 1..75: mol_type = other DNA
aaccacttcccgagccattgaagtggtgggcggcgcggcaaaagggaaggcgattattgtgcttaacccagcaga

SEQ ID NO: 884803 - DNA, 75 bp, synthetic construct
  source 1..75: mol_type = other DNA
acggtaactccaccactggcgacgccatttatatgcgcggtgctgatacctctaacagtatttatattgatggca

SEQ ID NO: 884804 - DNA, 75 bp, synthetic construct
  source 1..75: mol_type = other DNA
ccttcgctttatgcgccacaacaatctgccgatccgaaattctcgcgtccggtagcggatactacccgcacgatg

SEQ ID NO: 884805 - DNA, 75 bp, synthetic construct
  source 1..75: mol_type = other DNA
tctacaggtcagttagtctggaatcgatttaagtcgcagttgcgtacgacgaaaggaaaaaatagctacccatta

SEQ ID NO: 884806 - DNA, 75 bp, synthetic construct
  source 1..75: mol_type = other DNA
aaactggcacatgcctgcgcacgcgcgagcctgttatgcgccaacgccatcgacggggcaaaaacactggaagag

SEQ ID NO: 884807 - DNA, 75 bp, synthetic construct
  source 1..75: mol_type = other DNA
caatgtattgcagtttattggtagatactgttatggcctgcaagttttttcctggtccggtttcccggattgcag

SEQ ID NO: 884808 - DNA, 75 bp, synthetic construct
  source 1..75: mol_type = other DNA
tgcggcgtgaacgccttatccggcctacaaagtcctgcagattcaatatattacaggtactgcgtagatactgtt

SEQ ID NO: 884809 - DNA, 75 bp, synthetic construct
  source 1..75: mol_type = other DNA
aaagggagcatgagcaaaatcagggaagtctttaatcatcacgatcatccgggagacagcggcggcaccacaaat

SEQ ID NO: 884810 - DNA, 75 bp, synthetic construct
  source 1..75: mol_type = other DNA
attcaatggtgggtgctggcgcagtattagtgcagtcgttagataatgggcaagtttgctatccggcaagatcgg

SEQ ID NO: 884811 - DNA, 75 bp, synthetic construct
  source 1..75: mol_type = other DNA
aaaattccgttacggcagtcgctgattctgaaaaccccggaggattttaaatcccgttttaacatagacgtccgt

SEQ ID NO: 884812 - DNA, 75 bp, synthetic construct
  source 1..75: mol_type = other DNA
atggggcattatggcgtaatgatggcgctaaaacttacctgctgcttaccaatcaaggtgatgtttatggtggat

SEQ ID NO: 884813 - DNA, 75 bp, synthetic construct
  source 1..75: mol_type = other DNA
ggtcagtcgtgcagatggcattccgtgcatcctgcctgcgtccgctcattatgccgcagagtcaatggtagctca

SEQ ID NO: 884814 - DNA, 75 bp, synthetic construct
  source 1..75: mol_type = other DNA
gagatcattgcgaatatcaatcagtacttgcaggtgatactcgatcatacacagggaaacgatgaagaggtattt

SEQ ID NO: 884815 - DNA, 75 bp, synthetic construct
  source 1..75: mol_type = other DNA
gcaggctgacggagaaaaccgacctcatcccggaagggggtatccgtacggatgatgagcgcacccaccggtacc

SEQ ID NO: 884816 - DNA, 75 bp, synthetic construct
  source 1..75: mol_type = other DNA
atgtttcggcgctttttaccgatttaatgaatcaaaatattttaagaaaagatgatcctgtgttggcggctgagt

SEQ ID NO: 884817 - DNA, 75 bp, synthetic construct
  source 1..75: mol_type = other DNA
tctggcgcaaaccgggctgattcgaatccttatgccgtcggtgatgcggtgacagtgttgtcggaggccggagag

SEQ ID NO: 884818 - DNA, 75 bp, synthetic construct
  source 1..75: mol_type = other DNA
atcacccgcgacggcttcgccttccttgctatgggcttcactggtaaacgtgccgcccggttcaaagaggcatac

SEQ ID NO: 884819 - DNA, 75 bp, synthetic construct
  source 1..75: mol_type = other DNA
ttggggcgtaccgcacttaatgaggccgtaagtaatgggtattttgatattgttaagcttttagtagaatcagga

SEQ ID NO: 884820 - DNA, 75 bp, synthetic construct
  source 1..75: mol_type = other DNA
aaggtagcggtattgtgctgattgtgctggcactggcgctggtgagccgtaagaaaaaagaagccgtcagtgtaa

SEQ ID NO: 884821 - DNA, 75 bp, synthetic construct
  source 1..75: mol_type = other DNA
tgcttctttgtattcttcttggtgcgtttatgatccgtagttgtattggtaagacaaacacatcaagcgaagcaa

SEQ ID NO: 884822 - DNA, 75 bp, synthetic construct
  source 1..75: mol_type = other DNA
ctaatggtactgagaaagtatcagcttatcatactcatggtgcagatagtcatggagaatattgggacgaaatat

SEQ ID NO: 884823 - DNA, 75 bp, synthetic construct
  source 1..75: mol_type = other DNA
ccaatctatttgcgaagataaagagttcgctggtttaatatgtaaggataatagtggcagatatttctcaacagc

SEQ ID NO: 884824 - DNA, 75 bp, synthetic construct
  source 1..75: mol_type = other DNA
tgtgatttattagttgtattcaatcagcatgtcattatattttctgataaagatattggttttaaagatactggg

SEQ ID NO: 884825 - DNA, 75 bp, synthetic construct
  source 1..75: mol_type = other DNA
tcaatgggcggaactggtgaaagaagcggtccagatatatgggggaatccgttctatcatcaatatctttgtgtc

SEQ ID NO: 884826 - DNA, 75 bp, synthetic construct
  source 1..75: mol_type = other DNA
acatttacccaaggaaaaacattaaccgtaaaaggtaattatgtcggtaataatggtcagcttaatatccgcacc

SEQ ID NO: 884827 - DNA, 75 bp, synthetic construct
  source 1..75: mol_type = other DNA
ttaagtgttgaactttcaagtgctttggatagtattgatgttaacaaaactacaacggatgtaagtatccttaat

SEQ ID NO: 884828 - DNA, 75 bp, synthetic construct
  source 1..75: mol_type = other DNA
tcatcgaatgtattttccacaaagaaggcacagatttccggctcagctggcgaccagacagtaagcatgaattac

SEQ ID NO: 884829 - DNA, 75 bp, synthetic construct
  source 1..75: mol_type = other DNA
ggagcctgggtcgacgtgttgaagggtgagctggagaatatgtcccgggacgccagcaccggcgacctgccggaa

SEQ ID NO: 884830 - DNA, 75 bp, synthetic construct
  source 1..75: mol_type = other DNA
ttctttgtattatgctcggtggtttcatgatccgtagttgtatgggaaaaacaaactcttcaagtgaagcaaagc

SEQ ID NO: 884831 - DNA, 75 bp, synthetic construct
  source 1..75: mol_type = other DNA
gacgataaaggacctattcggctagttaaagaaataagaaacaaattagctcatggttctctttcatttacacaa

SEQ ID NO: 884832 - DNA, 75 bp, synthetic construct
  source 1..75: mol_type = other DNA
tcgcattcatcacccaaaatgtatttaggtacacgcttttttgacctttcttcctcctggggaattgatgaccgt

SEQ ID NO: 884833 - DNA, 75 bp, synthetic construct
  source 1..75: mol_type = other DNA
tttttgaactacgaaaatttcgtagtgctatccatcaaggccatcgccgcttagttgctgcggtgaattttgggc

SEQ ID NO: 884834 - DNA, 75 bp, synthetic construct
  source 1..75: mol_type = other DNA
tgccagtgaagaaaacgtcaccgacccgaactatgccgacgagtatactgttcattatgagcttgggacgtggtc

SEQ ID NO: 884835 - DNA, 75 bp, synthetic construct
  source 1..75: mol_type = other DNA
tgatggcgaactctccgccgtgcagacgcgacccaactctgcaactgaccaccagccatctgtggaatttgccgt

SEQ ID NO: 884836 - DNA, 75 bp, synthetic construct
  source 1..75: mol_type = other DNA
catattacccaaccctaccctggcaaccactgacttattaccctgtttgccctggaacgcttaaggatatgagcg

SEQ ID NO: 884837 - DNA, 75 bp, synthetic construct
  source 1..75: mol_type = other DNA
tgaacaaagtcaggcttacgctcagtttgtcgccagcactgccgaatgttgcggtgaaggcggaattaaagcgtg

SEQ ID NO: 884838 - DNA, 75 bp, synthetic construct
  source 1..75: mol_type = other DNA
aaaggcacgctaaatgaccaggcggccagcgatgcgctgaaaaagcatgaacaatcccgaaatcaccctgatgca

SEQ ID NO: 884839 - DNA, 75 bp, synthetic construct
  source 1..75: mol_type = other DNA
catttacagagtggaaagcccagcaggctattaataatcagcccgtcgcgctggatgaatttattttcgcgtata

SEQ ID NO: 884840 - DNA, 75 bp, synthetic construct
  source 1..75: mol_type = other DNA
ggcagtacccgtaaaaaagagcggtgtcgacttacccgagtcagactttgaagcatgggctacgttacaggtgga

SEQ ID NO: 884841 - DNA, 75 bp, synthetic construct
  source 1..75: mol_type = other DNA
gcagaatatgatgaatggggcaacctgctgagtgatgagaacccgcatcatctgcagcagctcattcgcctgccg

SEQ ID NO: 884842 - DNA, 75 bp, synthetic construct
  source 1..75: mol_type = other DNA
ggatccgattggactgaaggggggatggaacctgtatggatatcaattgaatccgatatcagacatcgaccccct

SEQ ID NO: 884843 - DNA, 75 bp, synthetic construct
  source 1..75: mol_type = other DNA
gaaggagaagtacgatggttaagcaggcgaaagaaaattgtgacatacatccctgagcggctgcataaaacgtag

SEQ ID NO: 884844 - DNA, 75 bp, synthetic construct
  source 1..75: mol_type = other DNA
acagataaaacgaacattgttacctatggggaaaatgcagtaggtgttcttgcatgttcaagtcctggagagtct

SEQ ID NO: 884845 - DNA, 75 bp, synthetic construct
  source 1..75: mol_type = other DNA
tgacgctaccgaatccatccgtaaaatgaatgggtacacatacacgtttaaggacgacggcctgccttatgctgg

SEQ ID NO: 884846 - DNA, 75 bp, synthetic construct
  source 1..75: mol_type = other DNA
ttacgaccagttaaacaagccgactaaagcagatttgggcctttctaatgctatgcttacaggcgcttttggtct

SEQ ID NO: 884847 - DNA, 75 bp, synthetic construct
  source 1..75: mol_type = other DNA
attatacattccagacggatttgttaagcaaaccgccgcgccttctggatatgttgaaagccccgttgtaaggat

SEQ ID NO: 884848 - DNA, 75 bp, synthetic construct
  source 1..75: mol_type = other DNA
caatccgcaaaattaatggatacacgtacacgctcaaggagaatggggcacattgcgccggggttatagcccagg

SEQ ID NO: 884849 - DNA, 75 bp, synthetic construct
  source 1..75: mol_type = other DNA
gaagtaatggaggcgctaccggaagccgtaggatcgtttactcgttacggtgaagaattgcagggtccgaccatt

SEQ ID NO: 884850 - DNA, 75 bp, synthetic construct
  source 1..75: mol_type = other DNA
aggttagtgattcagattatataaacatgcaaacgctgattagcggcgacaaaggacgcgtgcatgttcgttttg

SEQ ID NO: 884851 - DNA, 75 bp, synthetic construct
  source 1..75: mol_type = other DNA
ctcgtcagcccgatgacgcaatacgattggcccgttgttactggtaatgagtctttttacataaagatcgcgaaa

SEQ ID NO: 884852 - DNA, 75 bp, synthetic construct
  source 1..75: mol_type = other DNA
cacccggatcagcactctggaaaatcaggtaagcgaactggttgcacttgtccggcagttaacaggaagcgaaca

SEQ ID NO: 884853 - DNA, 75 bp, synthetic construct
  source 1..75: mol_type = other DNA
caaaaatctgcggccacatctgcatccaccgcgaccacgaaagcgtcagaagctgccacctcagcccgggatgcg

SEQ ID NO: 884854 - DNA, 75 bp, synthetic construct
  source 1..75: mol_type = other DNA
taaaggtgattttactcaccgtgaggtggatgtttcatctatagataatgaatatttacaagggtattgccactt

SEQ ID NO: 884855 - DNA, 75 bp, synthetic construct
  source 1..75: mol_type = other DNA
gcgctggaagaggaaaacacaacgctacgtcaaaatctggcaacagcagacacccggatcagcactctggaaaat

SEQ ID NO: 884856 - DNA, 75 bp, synthetic construct
  source 1..75: mol_type = other DNA
agagtcctgatcagaaacaaaacagcaaattgatcacgcaagcgaaactcgacaagggattaacgattggtggtc

SEQ ID NO: 884857 - DNA, 75 bp, synthetic construct
  source 1..75: mol_type = other DNA
agtggagaaattaaaaacttatccattgggtttaaggttgatgatgttgaacaaaaatatctcggcgtatacggt

SEQ ID NO: 884858 - DNA, 75 bp, synthetic construct
  source 1..75: mol_type = other DNA
tggaaatataggggcaaatccatcagcgcagtagtcagtgaatttggtggcaccatctttatgaatggtgataat

SEQ ID NO: 884859 - DNA, 75 bp, synthetic construct
  source 1..75: mol_type = other DNA
ttgcagctggagctttcgaatatcaactaaaacaacaaggcaaaaactggtatttgacaagttatcagtcagtga

SEQ ID NO: 884860 - DNA, 75 bp, synthetic construct
  source 1..75: mol_type = other DNA
ctgtggctgatggaagttatgcagttgctattcgacaaggtaacattgatataaaaaatagttctattacaacaa

SEQ ID NO: 884861 - DNA, 75 bp, synthetic construct
  source 1..75: mol_type = other DNA
ctgtgattgaagaattggcacgccagcaggggcacgagcttaatgccgccgatatgctggagattcgttgccgtg

SEQ ID NO: 884862 - DNA, 75 bp, synthetic construct
  source 1..75: mol_type = other DNA
cctcctcgatgagcctgatgtacatctgcaccccgacctccaagctagactgggcaagctgataatcagtatgct

SEQ ID NO: 884863 - DNA, 75 bp, synthetic construct
  source 1..75: mol_type = other DNA
tcacttgtagatggtcagattattgatccggcccaaatcagtagcggtgaatcggaagcggttgcattagccgcg

SEQ ID NO: 884864 - DNA, 75 bp, synthetic construct
  source 1..75: mol_type = other DNA
tagctttgaagcactcgccgtacagttatttaggaaaacctgtcgagtaccgacaaattcaacatttattagtct

SEQ ID NO: 884865 - DNA, 75 bp, synthetic construct
  source 1..75: mol_type = other DNA
ttatgctcttgctttctatctggagaagtatccggacggtactcagactgcgcgggtcagagaaaagctattggc

SEQ ID NO: 884866 - DNA, 75 bp, synthetic construct
  source 1..75: mol_type = other DNA
gaaagatacgttgcgggcttgtgtgcgcttgttgatgaaaacggtggagtaaagttttttgttaacaggctgtct

SEQ ID NO: 884867 - DNA, 75 bp, synthetic construct
  source 1..75: mol_type = other DNA
gccaatatcagccatgaaaacattgcctgttggttaatgcgagaagcacttaatttaggatatcccggttataac

SEQ ID NO: 884868 - DNA, 75 bp, synthetic construct
  source 1..75: mol_type = other DNA
gagtcggtttatgaagcgctgttttcacttagtctggttcctgaccatcgtctaaacgcaactaactggctgggg

SEQ ID NO: 884869 - DNA, 75 bp, synthetic construct
  source 1..75: mol_type = other DNA
gtgcgctggaaggacaagcttcccgaattgctcgctcaatgcaagtcttatccagacatcaaaatctgcgtttca

SEQ ID NO: 884870 - DNA, 75 bp, synthetic construct
  source 1..75: mol_type = other DNA
agaagatgcttaatttaaatgataatgatgaaaaagtcaaaatcgaaaatgatataaagaaaatagataaaaaaa

SEQ ID NO: 884871 - DNA, 75 bp, synthetic construct
  source 1..75: mol_type = other DNA
aataattatattaatgaaaatttcacttataaatttcaagatttagccaacctttctggcacaagagatgctcag

SEQ ID NO: 884872 - DNA, 75 bp, synthetic construct
  source 1..75: mol_type = other DNA
ggtcgattatcctgagtatacttatcttctctatatcaatgatacgatcaggcatgatgaattaaaaaataaaat

SEQ ID NO: 884873 - DNA, 75 bp, synthetic construct
  source 1..75: mol_type = other DNA
ggtacagcagggcggctttgacgggcggacgcaacgttatcattatgacctgaccggaaaactcacgcagagtga

SEQ ID NO: 884874 - DNA, 75 bp, synthetic construct
  source 1..75: mol_type = other DNA
tgcagcgtacagaggcaaacgtgatctgccaggagtgccgcaacagcgcggcgatgagaagaattttaagcgtat

SEQ ID NO: 884875 - DNA, 75 bp, synthetic construct
  source 1..75: mol_type = other DNA
cagatgtggggagctacttaacctgcaaatcacagatatcgattttcatgatggtagtatatctattcgtagaag

SEQ ID NO: 884876 - DNA, 75 bp, synthetic construct
  source 1..75: mol_type = other DNA
cgcatattttctggctgagtctcggcggtttattgctggctgccgagatgctgggcggaaacggttatctgttgt

SEQ ID NO: 884877 - DNA, 75 bp, synthetic construct
  source 1..75: mol_type = other DNA
ggtttactaccccggaagtgttgctgattacgctggatggtagcgaagtgcccgacgtgctggcggattatttgc

SEQ ID NO: 884878 - DNA, 75 bp, synthetic construct
  source 1..75: mol_type = other DNA
ataaatcaaaccttagaacaaatggtacaagcccttttcaaaagttggtttgtcaattttgaaccggtaaaagcc

SEQ ID NO: 884879 - DNA, 75 bp, synthetic construct
  source 1..75: mol_type = other DNA
ggttttcccgcagtgatttgggctgttatctggtggtgtatcattagagataagccacatgaagtgaactggtta

SEQ ID NO: 884880 - DNA, 75 bp, synthetic construct
  source 1..75: mol_type = other DNA
tgcatcatttacgcttatggccttttctctgataattgctgcttcccttatctttttattaaaacataatgtcac

SEQ ID NO: 884881 - DNA, 75 bp, synthetic construct
  source 1..75: mol_type = other DNA
ctaaaagatggtggtaccttatgcctgctatatttattacttatagtctggcatatctggacagggctaattatg

SEQ ID NO: 884882 - DNA, 75 bp, synthetic construct
  source 1..75: mol_type = other DNA
cacataacaatgcttttggtggagggaaaaatccgggcattggtaataccagtggcgctggaagtaatggtagcg

SEQ ID NO: 884883 - DNA, 75 bp, synthetic construct
  source 1..75: mol_type = other DNA
acaaaagattcactcatctaaaagtatatagtggtttacatgaaattgattgcaatgatttaaaaaatatagcaa

SEQ ID NO: 884884 - DNA, 75 bp, synthetic construct
  source 1..75: mol_type = other DNA
cgcctgtcggcagtaaaaacgccggatgatttactgcgtcagttacgtcgcgcggtcaaattattaaacggttcc

SEQ ID NO: 884885 - DNA, 75 bp, synthetic construct
  source 1..75: mol_type = other DNA
cgcggtcaaattattaaacggttccgtcaatcttatctctttggcagacgatattttccgctggtgccaggagag

SEQ ID NO: 884886 - DNA, 75 bp, synthetic construct
  source 1..75: mol_type = other DNA
agccttttgtcttattcaaaggccttacatttcaaaaactctgcttaccaggcgtatttcgcccaggggatcacc

SEQ ID NO: 884887 - DNA, 75 bp, synthetic construct
  source 1..75: mol_type = other DNA
gaaaacagcctgcatccgcagatgctgcccgcgctggcgagcttaatggggtcggttccggctgagggcgaaatg

SEQ ID NO: 884888 - DNA, 75 bp, synthetic construct
  source 1..75: mol_type = other DNA
tggcgaatttaattgagaaacagagatcgttttcgctgtatcagctgtcgatggtggaaggggaaacgaaggtgg

SEQ ID NO: 884889 - DNA, 75 bp, synthetic construct
  source 1..75: mol_type = other DNA
ttacagccctctctgtgccgggtaaaaccgtgtcagatgattttatgcatgctgttctcagtaactgcgtcacaa

SEQ ID NO: 884890 - DNA, 75 bp, synthetic construct
  source 1..75: mol_type = other DNA
attaatgaccgccaaaaatatcacggtgattaccaacagtctcccggcagcgtttgccctttccgaaaataaaga

SEQ ID NO: 884891 - DNA, 75 bp, synthetic construct
  source 1..75: mol_type = other DNA
gccctgaaaaaaaccagaggcatttcagatgtccatgcggacgatatctggaaatcgctggaaaaggatgtgttt

SEQ ID NO: 884892 - DNA, 75 bp, synthetic construct
  source 1..75: mol_type = other DNA
cgacgacctgctcaatcatcaccgccgccagcagcggccaacagaatttatccgtatccgctgggcgctggaata

SEQ ID NO: 884893 - DNA, 75 bp, synthetic construct
  source 1..75: mol_type = other DNA
atgagtattgtaaaagaggagcataaagttgcgctgcgtaaatggcatgaagagttgcaggataaacgcggcgag

SEQ ID NO: 884894 - DNA, 75 bp, synthetic construct
  source 1..75: mol_type = other DNA
cggaggaaaaatatacagggatgcatcatcatcactggaaaatgttttgattttgggacttcctgcaggtgcatc

SEQ ID NO: 884895 - DNA, 75 bp, synthetic construct
  source 1..75: mol_type = other DNA
atttagccgatggcggagcatatccagcagttaatgctgaggttatactatctactccgtgtatcattcctattg

SEQ ID NO: 884896 - DNA, 75 bp, synthetic construct
  source 1..75: mol_type = other DNA
gcaaatcaacattcacggaggaaatgtccagattggagatcataaccgtcaggagattaccaatagtatcgaaac

SEQ ID NO: 884897 - DNA, 75 bp, synthetic construct
  source 1..75: mol_type = other DNA
aatttaatacaaaaggatttaatcttgacgaggtggttgcggaactaatatccacatcatattttgcacttaatg

SEQ ID NO: 884898 - DNA, 75 bp, synthetic construct
  source 1..75: mol_type = other DNA
cagtatctctttcttcagccagtcatcgcgctgcgcacgggcactgcgtttatcaggatgatgtcgctgttgctg

SEQ ID NO: 884899 - DNA, 75 bp, synthetic construct
  source 1..75: mol_type = other DNA
aacagagccttgaccaactatctcgtatctcgtcagagttcgaaccatcaagccagaagcgcaggaaaatgtctc

SEQ ID NO: 884900 - DNA, 75 bp, synthetic construct
  source 1..75: mol_type = other DNA
ccaggaaagtgcgttgcaggtagatgcattccactggaaagaagacggcatcagtgataaaggtgtgatgctaaa

SEQ ID NO: 884901 - DNA, 75 bp, synthetic construct
  source 1..75: mol_type = other DNA
agtcataaaacaacgcacagaagccgctgttgagttccagcgttcaattgaacagagtcttgagcaactatctcg

SEQ ID NO: 884902 - DNA, 75 bp, synthetic construct
  source 1..75: mol_type = other DNA
aatttgatcaagcagcaaaaaaatgcagatgaaagcacgttgcgcgcgcataaattagaaaaaaaagatgtttac

SEQ ID NO: 884903 - DNA, 75 bp, synthetic construct
  source 1..75: mol_type = other DNA
cgtcgccggcatcacaggacgcggtgaagatgtggcctttgggctggcgacggtccccggcgtcaaaaaaccacg

SEQ ID NO: 884904 - DNA, 75 bp, synthetic construct
  source 1..75: mol_type = other DNA
ctacacaggttggtagagcttgccaatttgcccctggaatcgcggctttgatttcaacgaaagaaaacgaaacgc

SEQ ID NO: 884905 - DNA, 75 bp, synthetic construct
  source 1..75: mol_type = other DNA
ttgatttctgaagtgcaaaaagcgattgccggacgttgtgtcggtagtgctggtgtgcaaaaaattgcagctgcc

SEQ ID NO: 884906 - DNA, 75 bp, synthetic construct
  source 1..75: mol_type = other DNA
ggatgttaccttttcagcgtaacgatattctcaatattcgtgatattgaacaggggctggaaaatcttcagcgag

SEQ ID NO: 884907 - DNA, 75 bp, synthetic construct
  source 1..75: mol_type = other DNA
aaacgccggatatgcaatatggagacgttagcccggtgagcaatatctttaattttgagggtaattacacccgac

SEQ ID NO: 884908 - DNA, 75 bp, synthetic construct
  source 1..75: mol_type = other DNA
aaccctgtaagtcacgcatcagcccttgcatcaagaaagcttgaaaaagtacaagagtccattatctaccgaaag

SEQ ID NO: 884909 - DNA, 75 bp, synthetic construct
  source 1..75: mol_type = other DNA
cagcttccttaccattccgggttcagctatttcgaactcgacaagagtggccaggcctggacagaaatggctgcc

SEQ ID NO: 884910 - DNA, 75 bp, synthetic construct
  source 1..75: mol_type = other DNA
cggcctggtggtctggctggtgccgctgggttgggagtggcaaggggtgatgtttgccatcctgacgctgctcgc

SEQ ID NO: 884911 - DNA, 75 bp, synthetic construct
  source 1..75: mol_type = other DNA
gtgggagtggtcttgttttcattgacaagatctctaattgggcgggcgatttttcaggacagcgacatctttcgg

SEQ ID NO: 884912 - DNA, 75 bp, synthetic construct
  source 1..75: mol_type = other DNA
aaccccggtgcttcagcatctcctactcaataaaaacgttcctgagtcgctgaggttgcttacggactacataca

SEQ ID NO: 884913 - DNA, 75 bp, synthetic construct
  source 1..75: mol_type = other DNA
tcagtccggaaatatcggcgtcagcggtgaaggcggaacatcgcactggggtggcggtggacgcgcaggcgctgg

SEQ ID NO: 884914 - DNA, 75 bp, synthetic construct
  source 1..75: mol_type = other DNA
tggccagcagttgattggcaggcggtttgtgctggaatcgccgctggtcaacgggcgcggtcatatgcgcgtcgg

SEQ ID NO: 884915 - DNA, 75 bp, synthetic construct
  source 1..75: mol_type = other DNA
ccgaagctgttcgtatggaccaccctattgttgatgttgggagattatgcatatcaggcgacggaaaacaggctg

SEQ ID NO: 884916 - DNA, 75 bp, synthetic construct
  source 1..75: mol_type = other DNA
cttaccttagattacttagaggatctttcgacctcgctttttgatttgtcacaaaaaatcaacaatgctgaactt

SEQ ID NO: 884917 - DNA, 75 bp, synthetic construct
  source 1..75: mol_type = other DNA
cctcactggtactctccgtaaatgcgttagcaacgcctatacctgtgccttctcctgatacacaagcaccgggct

SEQ ID NO: 884918 - DNA, 75 bp, synthetic construct
  source 1..75: mol_type = other DNA
ggacgtgtgcgaaaacccggccagcaccacgctttggctggatgttgggcggagcagtggactggatttgaccta

SEQ ID NO: 884919 - DNA, 75 bp, synthetic construct
  source 1..75: mol_type = other DNA
gcagcattgagtttggtatgcgcagcgatgaagtggtgacgaaggcgatgctcaacctcgaatacacgccatcgc

SEQ ID NO: 884920 - DNA, 75 bp, synthetic construct
  source 1..75: mol_type = other DNA
agatggtaaggatagtgaatctggtttcagttggcgattgtgtcgcactaacagaaaagaatgacgaagcatatc

SEQ ID NO: 884921 - DNA, 75 bp, synthetic construct
  source 1..75: mol_type = other DNA
ttaatcgtcactctaccgatgtaattgtcacctggaatgcccgtaaggctgatgatgtccatattttaggaattg

SEQ ID NO: 884922 - DNA, 75 bp, synthetic construct
  source 1..75: mol_type = other DNA
atgcgatggcctggacagctgaacaggccgcagcggcacaagttatgtgtgctgtagaaatcatggatacgccat

SEQ ID NO: 884923 - DNA, 75 bp, synthetic construct
  source 1..75: mol_type = other DNA
ggcgcgtacgattatgttgaaggcgttacgcctggcgcaggatttggggattcgaacaatccaactggcaggcta

SEQ ID NO: 884924 - DNA, 75 bp, synthetic construct
  source 1..75: mol_type = other DNA
tcagggcgctgctcaccagttccagttgttctgcactgacttcccccagatgatccagctcaccgccacactccg

SEQ ID NO: 884925 - DNA, 75 bp, synthetic construct
  source 1..75: mol_type = other DNA
ttaacacgcgggcaagtaatccggggcccgcgataccacgctctatcgggcgggacggcgccggtgcttcaacga

SEQ ID NO: 884926 - DNA, 75 bp, synthetic construct
  source 1..75: mol_type = other DNA
atgtctgttgaagaaaatatcaaaacggttaaaaagttttatcgtctgattgaagaaaataaatatgatgaggtg

SEQ ID NO: 884927 - DNA, 75 bp, synthetic construct
  source 1..75: mol_type = other DNA
caagtattcctctgtttctgctgttatctggttgtgataataagcaggaagaattaaaactggcaaatgaacaac

SEQ ID NO: 884928 - DNA, 75 bp, synthetic construct
  source 1..75: mol_type = other DNA
cgtatcagcagccattccttatacgggggaggggggggctggccgcacaagcccgtgcagtatttccccggcaaa

SEQ ID NO: 884929 - DNA, 75 bp, synthetic construct
  source 1..75: mol_type = other DNA
agctgcttctgaattaggaatgatggtagttgatggtctttcatatacaggagttcgcagattcgatggtaaata

SEQ ID NO: 884930 - DNA, 75 bp, synthetic construct
  source 1..75: mol_type = other DNA
cagatatcggatacgccatacattttgccgttgctgatggcggggcgcgtggctggttcgactttaccgcgcagc

SEQ ID NO: 884931 - DNA, 75 bp, synthetic construct
  source 1..75: mol_type = other DNA
taccagccgggaagcttcacgccgctcctgagaatcgaaacagagaatggcgaacaggcgaaggcgcggcaccgg

SEQ ID NO: 884932 - DNA, 75 bp, synthetic construct
  source 1..75: mol_type = other DNA
tagggatgcttgctgagtttatttatagcaatacaaaaaccaacaacaaacttttaaacaaagcaattaaaatgt

SEQ ID NO: 884933 - DNA, 75 bp, synthetic construct
  source 1..75: mol_type = other DNA
cataaaataaagtacatgaaatacttgctagttgcaggtcttacatttgttgtatcaacaatctctgtcgccata

SEQ ID NO: 884934 - DNA, 75 bp, synthetic construct
  source 1..75: mol_type = other DNA
atgatactttggtctatgaaaaaagaaaccgatatccgacggggaaggcattgtgttttcctgaggcatgttcac

SEQ ID NO: 884935 - DNA, 75 bp, synthetic construct
  source 1..75: mol_type = other DNA
gggcgttaaccagatagagacggtgggcagtaaccagatcattaacgtgggttctgttcaggtggaaacgattgg

SEQ ID NO: 884936 - DNA, 75 bp, synthetic construct
  source 1..75: mol_type = other DNA
taaaaagatcaatcagggcgctgtagattcaatctgtcaatgcaacacccctttcaattatctctttcggtgttt

SEQ ID NO: 884937 - DNA, 75 bp, synthetic construct
  source 1..75: mol_type = other DNA
atgatactttggtctctgaaaaaagaaaccgatatccgccggggaaggcattgtgttttcctgaggcatgttcac

SEQ ID NO: 884938 - DNA, 75 bp, synthetic construct
  source 1..75: mol_type = other DNA
atgatactttggtctttgaaaaaagaaaccgatatccgtcggggaaggcattgtgttttcctgaggcatgttcac

SEQ ID NO: 884939 - DNA, 75 bp, synthetic construct
  source 1..75: mol_type = other DNA
atgatactttggtctatgaaaaaagaaaccgatatccggcgaggaaggcattgtgttttcctgaggcatgttcac

SEQ ID NO: 884940 - DNA, 75 bp, synthetic construct
  source 1..75: mol_type = other DNA
tgatatcaccggcgacagcgcaacggtggacaacaaaggcggcatgactgtcaccgatccggattccatcggtat

SEQ ID NO: 884941 - DNA, 75 bp, synthetic construct
  source 1..75: mol_type = other DNA
gtggagctttcttctttggcaagccaccttctgatattacagcgcttatttctgttttttgttttgttgtaatga

SEQ ID NO: 884942 - DNA, 75 bp, synthetic construct
  source 1..75: mol_type = other DNA
ttcaatggttacattgatgacattttatctttcaaaagaaaggctttcatcgttatgggccatttcattttgcgt

SEQ ID NO: 884943 - DNA, 75 bp, synthetic construct
  source 1..75: mol_type = other DNA
aaagggaacttagtaaaaacgggagtttcagtccctcaaatacaacaagttatgcaaaaattccctgtatttcaa

SEQ ID NO: 884944 - DNA, 75 bp, synthetic construct
  source 1..75: mol_type = other DNA
tctgaccacttcattttctaaaagcttaatcaatattattattgaacctaacagaggtaaagtggcagttccact

SEQ ID NO: 884945 - DNA, 75 bp, synthetic construct
  source 1..75: mol_type = other DNA
tgtatttttggatatgagtaagcgtgcagcaagaaccgtattgacggggatgtgttattcagtcggcagtgctac

SEQ ID NO: 884946 - DNA, 75 bp, synthetic construct
  source 1..75: mol_type = other DNA
caatcagttatttgttgtgtccaacgtcgaaccggacagccatggcggctcacgtcttgttctcaatgtggcgaa

SEQ ID NO: 884947 - DNA, 75 bp, synthetic construct
  source 1..75: mol_type = other DNA
atgaacttcgtcgctacatcggtcatgaagggcaagaagagaagaaagcacgtctaaatgatatagttgaaagcg

SEQ ID NO: 884948 - DNA, 75 bp, synthetic construct
  source 1..75: mol_type = other DNA
cacttaagaaaattggccccgtaagagctactattagatggtttaatagagaacggttacgccagcaagctactt

SEQ ID NO: 884949 - DNA, 75 bp, synthetic construct
  source 1..75: mol_type = other DNA
tccaaggccaacaccttcagggactgtaataaagataacagcacttaaaagctcttggactgaagaaaaagttcg

SEQ ID NO: 884950 - DNA, 75 bp, synthetic construct
  source 1..75: mol_type = other DNA
acctatccgacaaacgttgctcaagcagtgcaatggtcgcacgataatccacttaaacaaggcgatgctgctatt

SEQ ID NO: 884951 - DNA, 75 bp, synthetic construct
  source 1..75: mol_type = other DNA
atttcccgtacctcgatctggcagtggatccatcatcaaaaaacgttgagcaatggcaaaccggtgaccaaagcc

SEQ ID NO: 884952 - DNA, 75 bp, synthetic construct
  source 1..75: mol_type = other DNA
gttatgagagtgatcctctggtagtcacattgcagtatcagaacgaggactatggctatggttatcgctcagaaa

SEQ ID NO: 884953 - DNA, 75 bp, synthetic construct
  source 1..75: mol_type = other DNA
attctttaaatctgctgatgcacagaaacctactatgcaggatctgattaaagcaaaagcagaacaaatcaaaca

SEQ ID NO: 884954 - DNA, 75 bp, synthetic construct
  source 1..75: mol_type = other DNA
aacggtactgataactatactgttaatgtagatagtggcgtagtacaggataaagatggcaaacaagtttatgtg

SEQ ID NO: 884955 - DNA, 75 bp, synthetic construct
  source 1..75: mol_type = other DNA
atctggcaaaaattgatgcgaaaactctcggcctggacggctttaatatcgatggcgcgcagaaagcaactggca

SEQ ID NO: 884956 - DNA, 75 bp, synthetic construct
  source 1..75: mol_type = other DNA
cggtattattcacctggtcgatagcgcccggacggaaacggtacgtagcgttaacgcgctgatgaccgcgacata

SEQ ID NO: 884957 - DNA, 75 bp, synthetic construct
  source 1..75: mol_type = other DNA
atggaatcgctctcagagagaacctcaacaggctaccagcaaatccacgacggtattattcacctggtcgatagc

SEQ ID NO: 884958 - DNA, 75 bp, synthetic construct
  source 1..75: mol_type = other DNA
actgcgtaaatccatgacactgactgaacatcagaatctgagtctggaatacggtattgcgcgtctggatggtaa

SEQ ID NO: 884959 - DNA, 75 bp, synthetic construct
  source 1..75: mol_type = other DNA
gaaatttttggcctggatgtcgccatggaccgtgttgaaggagctgcgctggagttttatgaggcagcagccaga

SEQ ID NO: 884960 - DNA, 75 bp, synthetic construct
  source 1..75: mol_type = other DNA
cttcttacaagtgtagttgcgtattttgcaaaatcagcgaatgctacagaggtttttctttattttattggcttt

SEQ ID NO: 884961 - DNA, 75 bp, synthetic construct
  source 1..75: mol_type = other DNA
atttgttattggcgatgaaacgtggctggtgattgaggtaccggaaatctggcctgactggacgagggttattgt

SEQ ID NO: 884962 - DNA, 75 bp, synthetic construct
  source 1..75: mol_type = other DNA
cgttattctctggcgtggcaaaatcgttagcaatccaccgggaacacccactgtcgatattgccagctttcaagc

SEQ ID NO: 884963 - DNA, 75 bp, synthetic construct
  source 1..75: mol_type = other DNA
ggacacggtgcgttttgcgtatgaccgcagcgggtggctgacggcagagcacagcgtgcacggcagtatcaaata

SEQ ID NO: 884964 - DNA, 75 bp, synthetic construct
  source 1..75: mol_type = other DNA
gcacgcaggggaaactggcgacgttcagcggctacaacgccgacaaccggttaagctggcagcgcagtctgccag

SEQ ID NO: 884965 - DNA, 75 bp, synthetic construct
  source 1..75: mol_type = other DNA
tattgcttaatgacttttttgaagaaattatatcgaaccatgaaaaagataaaaaaataaaagatgctttatcct

SEQ ID NO: 884966 - DNA, 75 bp, synthetic construct
  source 1..75: mol_type = other DNA
tgcgaaaagcagccatggacagaaactatctggcgtcagtccttgcggggagcgggctttcgtaatcttgccctg

SEQ ID NO: 884967 - DNA, 75 bp, synthetic construct
  source 1..75: mol_type = other DNA
ccgggtgatcttgttcgggtcacgcagattatcaacggcgggcaaaacgggattaataaccggcgcgcccgcttc

SEQ ID NO: 884968 - DNA, 75 bp, synthetic construct
  source 1..75: mol_type = other DNA
agttgagtcttatctgcagcatcagtactcctttaagattgaaaatcctgccaataagcacgagcgtcctcatca

SEQ ID NO: 884969 - DNA, 75 bp, synthetic construct
  source 1..75: mol_type = other DNA
tgggagtattaccgattaccaaagaacaactgggaaaaaaaacgttggcggaaataacgcttaacccattgtatt

SEQ ID NO: 884970 - DNA, 75 bp, synthetic construct
  source 1..75: mol_type = other DNA
tatgacctgaccggaaaactcacgcagagtgaagacgaggggcttatcaccctctggcactacgatgcgtcggac

SEQ ID NO: 884971 - DNA, 75 bp, synthetic construct
  source 1..75: mol_type = other DNA
gtacggtcaacaaatcgccgttcaccgggaggaaggcatcagcacttacagcagttataacccgcgtgggcaact

SEQ ID NO: 884972 - DNA, 75 bp, synthetic construct
  source 1..75: mol_type = other DNA
tcgatatgggcgcagggttcgatgaaatgcacgagcgctcccatgcctatcacccttccgtcccgcccgccgctc

SEQ ID NO: 884973 - DNA, 75 bp, synthetic construct
  source 1..75: mol_type = other DNA
ccagtgcattgggcatcgtcctctcatgaggtagatgtaaagaatgcacaaagctgggctgtcaccattcgccag

SEQ ID NO: 884974 - DNA, 75 bp, synthetic construct
  source 1..75: mol_type = other DNA
gaagctctggggatataagcgcgaagaggtcattggcaataacatcgatatgctcatcccccataatttgcgccc

SEQ ID NO: 884975 - DNA, 75 bp, synthetic construct
  source 1..75: mol_type = other DNA
cgcagcatggacatgttcccccttcccggtttattcccctcgcagaagagattggtgaaattgaaaatattggtc

SEQ ID NO: 884976 - DNA, 75 bp, synthetic construct
  source 1..75: mol_type = other DNA
gatattaggtgcggcgctgaaagaagcaatcagcaacaaccagttgaagctggtttaccagccgcagatcttcgc

SEQ ID NO: 884977 - DNA, 75 bp, synthetic construct
  source 1..75: mol_type = other DNA
ttggcgtcgaccatattcaggatgtgatcgacagcctcggctatgcgtgggccgatcaggcattgttagaagtcg

SEQ ID NO: 884978 - DNA, 75 bp, synthetic construct
  source 1..75: mol_type = other DNA
tgagtcaatgctggaagcaacggaagatgatcgccatcctggctgtccggtatttgctggtatgaaattgccgga

SEQ ID NO: 884979 - DNA, 75 bp, synthetic construct
  source 1..75: mol_type = other DNA
gctgatacaggcacagaccgcctggcgcgccacactctctcagtatcccggcgtactctggctggacttcatgcc

SEQ ID NO: 884980 - DNA, 75 bp, synthetic construct
  source 1..75: mol_type = other DNA
ggggcgaaaactctaccggtattaacaacggaaatattacgctttctcaatatgactattcttctccggagacat

SEQ ID NO: 884981 - DNA, 75 bp, synthetic construct
  source 1..75: mol_type = other DNA
caaaatcgataaaagctttgtcgatcgctgtctgacggaaaaacgcattcgcgcgttgctggaggccattacaag

SEQ ID NO: 884982 - DNA, 75 bp, synthetic construct
  source 1..75: mol_type = other DNA
tttcgactgcccataatgcgatggattttattcgtaaaagcggtggtaacggctggcaattctttagccctgcga

SEQ ID NO: 884983 - DNA, 75 bp, synthetic construct
  source 1..75: mol_type = other DNA
aatccgcccaccttgccgcgcgccggtgccgtgtgggaatccgcccaccttgccgcgcgccggtgctgtgtggaa

SEQ ID NO: 884984 - DNA, 75 bp, synthetic construct
  source 1..75: mol_type = other DNA
atgatgggtgcggtgttaattaacgaaaatgatgaagtgatgtttttcaaccccgccgcagagaagctctgggga

SEQ ID NO: 884985 - DNA, 75 bp, synthetic construct
  source 1..75: mol_type = other DNA
attaatgaccagaatggggttattaatattaacactgatattggccaggcgttttataaagatagcaccggcacc

SEQ ID NO: 884986 - DNA, 75 bp, synthetic construct
  source 1..75: mol_type = other DNA
atctttacggttattccgtgatcacgctggacaatggttttctgaaagtggttcgctcagctaatgtaaaaacat

SEQ ID NO: 884987 - DNA, 75 bp, synthetic construct
  source 1..75: mol_type = other DNA
gaacaatacggcgcgaacttcaataacgccgatatccgccagttcgtggaaatagtgggtcagcatcttggcaaa

SEQ ID NO: 884988 - DNA, 75 bp, synthetic construct
  source 1..75: mol_type = other DNA
ctgggatgtcctgctgacggatgtttttcataaaagctggccgctggcctccgatccttctcaacaaatgcgact

SEQ ID NO: 884989 - DNA, 75 bp, synthetic construct
  source 1..75: mol_type = other DNA
ttctaacaatgggatcattctccgcacttgctggcggtgcatggcaaccttccgttgggcctggggagtgcatct

SEQ ID NO: 884990 - DNA, 75 bp, synthetic construct
  source 1..75: mol_type = other DNA
ttggttggctctgaagatttaccggtgctggatgaaaacacgttcaacagccacccccctgtgtcatcgtcgcgg

SEQ ID NO: 884991 - DNA, 75 bp, synthetic construct
  source 1..75: mol_type = other DNA
gcgccggtgctgtgtggaaatccgcccaccttaccgggcgccggtgccgtgtgggaatcagcccaccttgccggg

SEQ ID NO: 884992 - DNA, 75 bp, synthetic construct
  source 1..75: mol_type = other DNA
cccaccttaccggacgccggtgccgtgtgggaatcagcccaccttgccgcgcgccggtgctgtgtggaaatccgc

SEQ ID NO: 884993 - DNA, 75 bp, synthetic construct
  source 1..75: mol_type = other DNA
agaaacgggtgaactgtacggcatcgaagcccttgctcgctggcacgatccccagcatggtcatgtgcccccttc

SEQ ID NO: 884994 - DNA, 75 bp, synthetic construct
  source 1..75: mol_type = other DNA
tgatcgagataatagaataattaatgatttaaattcttatcttcgagagaatgtagattttgcgaagtttattag

SEQ ID NO: 884995 - DNA, 75 bp, synthetic construct
  source 1..75: mol_type = other DNA
gacatgctggcgctgcgtaaaacagttgacctgagcgaaagccagaccatgagcctggaatacggtatcgcgcgt

SEQ ID NO: 884996 - DNA, 75 bp, synthetic construct
  source 1..75: mol_type = other DNA
aaaccaccgcaaaaattcagagtattgaggaaaagagagaagaaaaagttattcaaggttattatgatggctatg

SEQ ID NO: 884997 - DNA, 75 bp, synthetic construct
  source 1..75: mol_type = other DNA
gttgaaacaaatagggaacaaatcgatacatataaagcaagagatgatgccaaaaaaaatatttattaacacacc

SEQ ID NO: 884998 - DNA, 75 bp, synthetic construct
  source 1..75: mol_type = other DNA
acccaacgacgaaaacaaactcagagcactgatatctgacctgaaacagcatagatactgctggtcgttgaccag

SEQ ID NO: 884999 - DNA, 75 bp, synthetic construct
  source 1..75: mol_type = other DNA
accttggagtgaattatcttcagggctattatttcggaagaccggaaaaactgctttcattctgtaatcaatatg

SEQ ID NO: 885000 - DNA, 75 bp, synthetic construct
  source 1..75: mol_type = other DNA
ggtgcgctgataacgtctttgctgtttgtcgccgtgcatatgcagcagtatcaaaacctgctgaccctagtggga

SEQ ID NO: 885001 - DNA, 75 bp, synthetic construct
  source 1..75: mol_type = other DNA
atatgtatacgcaatacaacgacgatgacaatctgcgggcattttttactgcgtataactcgatggcgcagggca

SEQ ID NO: 885002 - DNA, 75 bp, synthetic construct
  source 1..75: mol_type = other DNA
ctgtttagccgggggcgcggcgtcggtgcaccactggcgtggcaggtatggggcggtagctttcatatggatcgc

SEQ ID NO: 885003 - DNA, 75 bp, synthetic construct
  source 1..75: mol_type = other DNA
accggaactgaaatcgcgggtaacaacgcggtggtgaaccaggacggcgagctggatgtgagcggcggcggtcac

SEQ ID NO: 885004 - DNA, 75 bp, synthetic construct
  source 1..75: mol_type = other DNA
gaaacgattggacttgttcgtgcgctgaccgtgggcgtggcgtaccagacgacggtaggtggcattatgaacact

SEQ ID NO: 885005 - DNA, 75 bp, synthetic construct
  source 1..75: mol_type = other DNA
atgatactttggtctgtgaaaaaagaaaccgatatccggcggggaaggcattgtgttttcctgaggcatgttcac

SEQ ID NO: 885006 - DNA, 75 bp, synthetic construct
  source 1..75: mol_type = other DNA
atgatactttggtctctgaaaaaagaaaccgatatccggcgcggaaggcattgtgttttcctgaggcatgttcac

SEQ ID NO: 885007 - DNA, 75 bp, synthetic construct
  source 1..75: mol_type = other DNA
ccatacccgatgtgatcctgacattgctgaccatctttatccttgctccgctaaatgaggaaacactgtttcgtg

SEQ ID NO: 885008 - DNA, 75 bp, synthetic construct
  source 1..75: mol_type = other DNA
ttgccctgcatcgaacaggcccggaaggatgtccgtgctcttcgtcatctgcagcttctgcaccagaaccggtga

SEQ ID NO: 885009 - DNA, 75 bp, synthetic construct
  source 1..75: mol_type = other DNA
atgacgtcaaagtcggaaataacgttaccttcaccgttggtaaaacgaaaaaggatgataccgggcagaccgcga

SEQ ID NO: 885010 - DNA, 75 bp, synthetic construct
  source 1..75: mol_type = other DNA
atcaccgaggatttcgagttcgccattttcttcaagcaggccatggatagcggcctgctgcacatgccgttttac

SEQ ID NO: 885011 - DNA, 75 bp, synthetic construct
  source 1..75: mol_type = other DNA
ttatttttctcgcttatggattggcgtcacccgcgttctcatcagatcctgccacattaactatcaatggcagga

SEQ ID NO: 885012 - DNA, 75 bp, synthetic construct
  source 1..75: mol_type = other DNA
gtactgatggtaatcgacaaataacaggggtgaaagaaggggtcaatgataatgatgtagtaactgtcagccagt

SEQ ID NO: 885013 - DNA, 75 bp, synthetic construct
  source 1..75: mol_type = other DNA
acggatggtgaaagggttctaacagggattgccgatggagccgtcagtgcaaccagtactgatgctgtaaatggt

SEQ ID NO: 885014 - DNA, 75 bp, synthetic construct
  source 1..75: mol_type = other DNA
actaaaatatctgaacttccggatgtttttattgttgaaaataaagcggatgactttggggtctatgagcgtgtt

SEQ ID NO: 885015 - DNA, 75 bp, synthetic construct
  source 1..75: mol_type = other DNA
attgtaagaaaataggaattacattttcagtatatcaagatattatcttgacagaattaatgagtaacatcaatg

SEQ ID NO: 885016 - DNA, 75 bp, synthetic construct
  source 1..75: mol_type = other DNA
tttggtgaacattgtcatcacatctaccttgatgatatcaagaaaaaatacaaactgaattacctgaaaataaaa

SEQ ID NO: 885017 - DNA, 75 bp, synthetic construct
  source 1..75: mol_type = other DNA
atggtcagggcctgtatacagatgtatcacacggtcggcatgcatgatgaactgctgtggctgtcgatgtgtttt

SEQ ID NO: 885018 - DNA, 75 bp, synthetic construct
  source 1..75: mol_type = other DNA
atattttttcttcttatattctggaacaagagcataataagatcgaagaatctaataatgttgcctcacttttac

SEQ ID NO: 885019 - DNA, 75 bp, synthetic construct
  source 1..75: mol_type = other DNA
tttatgactggatggttaatgccaacctgccgattttcatcggtgactacaacaccggagaccagctccggtgga

SEQ ID NO: 885020 - DNA, 75 bp, synthetic construct
  source 1..75: mol_type = other DNA
ctgaaaatatatcaaagattaactctcttcaggctggacaaagtggtttggtacaacagaatgcaaacaacaaag

SEQ ID NO: 885021 - DNA, 75 bp, synthetic construct
  source 1..75: mol_type = other DNA
cggagatgttgacggtcggcctggcctgcagtgtgagcgtgtttatctttctgtttatttacccgtttcggcatg

SEQ ID NO: 885022 - DNA, 75 bp, synthetic construct
  source 1..75: mol_type = other DNA
atcacacggtcggcatgcatgatgaactgctgtggctgtcgatgtgttttctgacgctgggctgtctgattgagg

SEQ ID NO: 885023 - DNA, 75 bp, synthetic construct
  source 1..75: mol_type = other DNA
cactgattgccttgtttagtgatatatcaagagatgagttagcctcaagaatgacatcaatgcgacagtatgatt

SEQ ID NO: 885024 - DNA, 75 bp, synthetic construct
  source 1..75: mol_type = other DNA
ggcatggctgagtctgatgcaggagaaagcccgtctggaggctctgttaccggaaggatggcagaaagatttcac

SEQ ID NO: 885025 - DNA, 75 bp, synthetic construct
  source 1..75: mol_type = other DNA
gcacagccagctgaattacagttctctgcgcgaattgtacgcggtagcaaaccgtgagcctgtcaccattcatcc

SEQ ID NO: 885026 - DNA, 75 bp, synthetic construct
  source 1..75: mol_type = other DNA
ttcaaaacattagcaggtattatacctataattctttcatattattgttttatatcatatttaaaatttaaaaaa

SEQ ID NO: 885027 - DNA, 75 bp, synthetic construct
  source 1..75: mol_type = other DNA
gaatgtaaatggtttttttgcacatgagactttctctaatttcggttacattgggattgtgcttggcagtatgta

SEQ ID NO: 885028 - DNA, 75 bp, synthetic construct
  source 1..75: mol_type = other DNA
aacttgctgggtttatctagcatggatactatttttaacaaaatacttagtattactccaacagcaagggcttca

SEQ ID NO: 885029 - DNA, 75 bp, synthetic construct
  source 1..75: mol_type = other DNA
cgctgaatacgctcagtattgaccctaacaactccaaccagattattgccgaacaggtgctgccggaggacgtag

SEQ ID NO: 885030 - DNA, 75 bp, synthetic construct
  source 1..75: mol_type = other DNA
ctctggtccgtacggccaatactcacggatgaaaatcaaagcagggagcatgaggcagctcgctactccccagct

SEQ ID NO: 885031 - DNA, 75 bp, synthetic construct
  source 1..75: mol_type = other DNA
cagatctcgttcatgaagtcacctttattcatgccgggtttgatgagccaaaagctttacatgaaagatttgggg

SEQ ID NO: 885032 - DNA, 75 bp, synthetic construct
  source 1..75: mol_type = other DNA
tcttcatgggatacacaaagaggaatgtcaacaccaaatgaaggtaaagctacagtgaaagaggcggcgcttacg

SEQ ID NO: 885033 - DNA, 75 bp, synthetic construct
  source 1..75: mol_type = other DNA
aatatccctttcttcttaagaaaaagaattcgaattcttattgaaaatacgcttacaaaagaagaattagtagaa

SEQ ID NO: 885034 - DNA, 75 bp, synthetic construct
  source 1..75: mol_type = other DNA
ggagcttttcgctactgcaaaaattaaacacggataagtttagcatgtatagaaatcagttcgatgagataaatg

SEQ ID NO: 885035 - DNA, 75 bp, synthetic construct
  source 1..75: mol_type = other DNA
tggagggcgcccggctgcgcgcgttatcggagcgtttccgcgcaacccgtgtgcgagcacaaaaataccttgcag

SEQ ID NO: 885036 - DNA, 75 bp, synthetic construct
  source 1..75: mol_type = other DNA
ttttggatttttgggtggcgttaatcattatgttttgattgtttcggttaatgccaaaagaaataaaataacaat

SEQ ID NO: 885037 - DNA, 75 bp, synthetic construct
  source 1..75: mol_type = other DNA
ctgatgctgccggggaaaggcgtaacgaaaaaacagcctccgttaccggagagcaagcaggctgaatgtagttta

SEQ ID NO: 885038 - DNA, 75 bp, synthetic construct
  source 1..75: mol_type = other DNA
ctgatgctgccggggaaaggcgtaacgaaaaaacagcctccgttaccggacagcaaggaggctgaatgtagttta

SEQ ID NO: 885039 - DNA, 75 bp, synthetic construct
  source 1..75: mol_type = other DNA
cattcgccctggcaccgatggcgcactggcctgtgcgattgcctgggtactgattacggaaaacatggtcgatca

SEQ ID NO: 885040 - DNA, 75 bp, synthetic construct
  source 1..75: mol_type = other DNA
cgatgaactatgttgatagaaatacattgcagcttgatacctccgtcttattcgacatgccaagccctgcaatgc

SEQ ID NO: 885041 - DNA, 75 bp, synthetic construct
  source 1..75: mol_type = other DNA
gcagacctggatattctgggtatagtatatgtgatttttataatgttgtcgggagaatagaggaaacattggtca

SEQ ID NO: 885042 - DNA, 75 bp, synthetic construct
  source 1..75: mol_type = other DNA
gacgtttacctccctcctgaactttttgctcaggcttacaagttaaacaataaggaaatgaatgcacaacttgac

SEQ ID NO: 885043 - DNA, 75 bp, synthetic construct
  source 1..75: mol_type = other DNA
atgtttgttgagttcttccgcaagcataacttgcgcgaaacaatggacgatgtgcaggcgttttttgacggcatg

SEQ ID NO: 885044 - DNA, 75 bp, synthetic construct
  source 1..75: mol_type = other DNA
acgatgtgcaggcgttttttgacggcatgggtacgcagtttgccaacgtggtaacgctggtggtcgcgggtgaaa

SEQ ID NO: 885045 - DNA, 75 bp, synthetic construct
  source 1..75: mol_type = other DNA
ctgatgctgccggggaaaggcgtaacgaaaaaacagcctccgttaccggacagcaagtaggctgaatgaagttta

SEQ ID NO: 885046 - DNA, 75 bp, synthetic construct
  source 1..75: mol_type = other DNA
ctgatgctgccggggaaaggcgtaacgaaaaaacagcctccgttaccggatagcaagaaggctgaatggagttta

SEQ ID NO: 885047 - DNA, 75 bp, synthetic construct
  source 1..75: mol_type = other DNA
cctatgagtatcaatgcacaaccttttagtgcagcgattattcttcttgatggaactaatgaagatattgatggc

SEQ ID NO: 885048 - DNA, 75 bp, synthetic construct
  source 1..75: mol_type = other DNA
acttcttgataagagtatgactattgctaaggttgataacctccttcattcagatctcgttcatgaagtcacctt

SEQ ID NO: 885049 - DNA, 75 bp, synthetic construct
  source 1..75: mol_type = other DNA
acacgatagtccggaaagcggtcgataaacttgctgatgctgcaacgctgaccggcgaggcaaaagccagtgccg

SEQ ID NO: 885050 - DNA, 75 bp, synthetic construct
  source 1..75: mol_type = other DNA
tttgctgatttaggtttttcagcagcaactacacgtgaatttgctcgcctctctggtggtgatgaacaaaatgaa

SEQ ID NO: 885051 - DNA, 75 bp, synthetic construct
  source 1..75: mol_type = other DNA
atccccgctgggagggaaaagatgaaatattctgggggatgatgaattcgcaaatttgccttgaaagaaaacgtg

SEQ ID NO: 885052 - DNA, 75 bp, synthetic construct
  source 1..75: mol_type = other DNA
atcgagttgcgccagaaacaatacgaatactaccgtgatttactgttcagtttcccgaaacctgaaactgccagt

SEQ ID NO: 885053 - DNA, 75 bp, synthetic construct
  source 1..75: mol_type = other DNA
tggcctttcacacaacatcaagcaggcggaagggatagcgatggatgacagcggcaacatttatatcgttggcga

SEQ ID NO: 885054 - DNA, 75 bp, synthetic construct
  source 1..75: mol_type = other DNA
aattgctggatgggattgaggttgagtggaaaacactaggcagtatagctgaactaaagcgaggcacatcaatta

SEQ ID NO: 885055 - DNA, 75 bp, synthetic construct
  source 1..75: mol_type = other DNA
catatggtatttcaccttattatactatttattccggtgggattttaagctcatcgtataattcttttttaatag

SEQ ID NO: 885056 - DNA, 75 bp, synthetic construct
  source 1..75: mol_type = other DNA
cacgcagtatggggtaagtctaaatcctgtaggacttcttatcatatccatgattccagttttcagaaagtaaaa

SEQ ID NO: 885057 - DNA, 75 bp, synthetic construct
  source 1..75: mol_type = other DNA
acttctggtgctgtctcatgagtctcgcgcactccaggaagtcacccaaacaggcgaggtcatcggtgagatgtc

SEQ ID NO: 885058 - DNA, 75 bp, synthetic construct
  source 1..75: mol_type = other DNA
ggatagcgatggacgccactggcaatatctatatcgttggcgaacccaatcttttttatcgctttacccctacat

SEQ ID NO: 885059 - DNA, 75 bp, synthetic construct
  source 1..75: mol_type = other DNA
tttttattgtggctgttctccgatgatggtcaggaatggcacgaagcccaggaaaaatttcagccagacactctg

SEQ ID NO: 885060 - DNA, 75 bp, synthetic construct
  source 1..75: mol_type = other DNA
ttgattgcctgcgccgccgccgatgcgcgtcatgagctaaaaatatttagctatctggcaagcgtattgtgtcag

SEQ ID NO: 885061 - DNA, 75 bp, synthetic construct
  source 1..75: mol_type = other DNA
tgagcttaccgctgagcttaacatgcgtaaaaaacagtacaactactatcgtgaccagttgttgagttttaaaga

SEQ ID NO: 885062 - DNA, 75 bp, synthetic construct
  source 1..75: mol_type = other DNA
cgtattacgctgattgctgcgcaaaatgaagaagatggtgcacgtttttgtggcgctgggcgcaaaaaaataatc

SEQ ID NO: 885063 - DNA, 75 bp, synthetic construct
  source 1..75: mol_type = other DNA
aaagatatttctgtctcgacctcgttcaacaccacccattatgaagataaagatcgcgacaaccagatttacttt

SEQ ID NO: 885064 - DNA, 75 bp, synthetic construct
  source 1..75: mol_type = other DNA
ttaccggcaataaaagaatgtgtcgattttagtgtcttccctgaaatcatctttactttcgatcaggcaaatcaa

SEQ ID NO: 885065 - DNA, 75 bp, synthetic construct
  source 1..75: mol_type = other DNA
tttaggcgattacataatccgagtcacttccctggtttagggacagttaaaaaattgtctatgattcaccatata

SEQ ID NO: 885066 - DNA, 75 bp, synthetic construct
  source 1..75: mol_type = other DNA
gaggccgggcaggctccagtatggtttttgctgggagatgccggtttgccgagtatcagcgatcgtctgacaggt

SEQ ID NO: 885067 - DNA, 75 bp, synthetic construct
  source 1..75: mol_type = other DNA
aaagcggaacaatatcgaatcagcgtcaaaacccaaacgcgtatcaatgaatatgttgaacgctatggttatatc

SEQ ID NO: 885068 - DNA, 75 bp, synthetic construct
  source 1..75: mol_type = other DNA
catctgacccaggcggttatcgactggaaagcgagttgcgaacgccgttttgttttcaggccgaacgaagcggta

SEQ ID NO: 885069 - DNA, 75 bp, synthetic construct
  source 1..75: mol_type = other DNA
aagaaatagtgaattatttcacaaaaaagtctcatcggtagcgaatgcgttcgggcttagaaaaactataaatga

SEQ ID NO: 885070 - DNA, 75 bp, synthetic construct
  source 1..75: mol_type = other DNA
tgatgcaatcgcagcttccatcaccgaaggtctcccgcgtgaaatcgagttgcgccagaaacaatacgagtacta

SEQ ID NO: 885071 - DNA, 75 bp, synthetic construct
  source 1..75: mol_type = other DNA
cgggcgctctatccgtcgacggatgaatcatcctgataggttgaaatatcccatgaagcgcgtcggcaagcgcgg

SEQ ID NO: 885072 - DNA, 75 bp, synthetic construct
  source 1..75: mol_type = other DNA
caaggatgtcgatttaaaaaatcgttttgatcagatatggcctcgattaacccatgagcaaagacgtgtactgat

SEQ ID NO: 885073 - DNA, 75 bp, synthetic construct
  source 1..75: mol_type = other DNA
agcgagctgtgaacgccgttttgtgttcaggccgaatgaagcgataacgccagcagacagacaagcggtaatggc

SEQ ID NO: 885074 - DNA, 75 bp, synthetic construct
  source 1..75: mol_type = other DNA
tgggatgtactggagagaattaagcggcagtttgattcagaagggataagttttccatatccacaaatggatatc

SEQ ID NO: 885075 - DNA, 75 bp, synthetic construct
  source 1..75: mol_type = other DNA
atgttgcccggttacgccgcgaatcttgtggcagcagtggttattattatcgggggtatcgctgcacggatgatt

SEQ ID NO: 885076 - DNA, 75 bp, synthetic construct
  source 1..75: mol_type = other DNA
ctctgatgatggcgtgatgacgtcgggcaagtcgctgcttgaggctggcttcaacaagctgctggacatagagaa

SEQ ID NO: 885077 - DNA, 75 bp, synthetic construct
  source 1..75: mol_type = other DNA
atcaggaaccgacgctatatggggcgaacggtcagacctcaacaacccatcgcggcggtaaaaagatttcgatct

SEQ ID NO: 885078 - DNA, 75 bp, synthetic construct
  source 1..75: mol_type = other DNA
cgatggcaattcagcgacagcatccggattcccggatctttcgttactgcacaggcaaataccagtggcacggca

SEQ ID NO: 885079 - DNA, 75 bp, synthetic construct
  source 1..75: mol_type = other DNA
gcgtcaacgcggtcgcaccgggaatgattgaatcgaaaatggtgaaaaaagtatcccgcgcagtggtccgtgcgg

SEQ ID NO: 885080 - DNA, 75 bp, synthetic construct
  source 1..75: mol_type = other DNA
ccgatgcgtggcgaaccggtacaccctagccgcgtcatcctgttctgcgaagggtcagaagacgacaacgtcctg

SEQ ID NO: 885081 - DNA, 75 bp, synthetic construct
  source 1..75: mol_type = other DNA
caatagacgcattatcaataatgcatatcaatatcagagaatctaactttgctttttctgaagggtataatagct

SEQ ID NO: 885082 - DNA, 75 bp, synthetic construct
  source 1..75: mol_type = other DNA
gcgatacagctcgttgaacccggcgtacgcatccgcttgcagcacactgtcacgaacggtgcaatagtcatccgt

SEQ ID NO: 885083 - DNA, 75 bp, synthetic construct
  source 1..75: mol_type = other DNA
gcaagaagtggtctgaacctgttgacaccaccattgtgggaaggcttcaggaaaaggcactcgttaagctgattc

SEQ ID NO: 885084 - DNA, 75 bp, synthetic construct
  source 1..75: mol_type = other DNA
agcgcgccagtaactccagtgttgagagggagcggaataaaaacctctcaatgctgtttaacggcaccagtaata

SEQ ID NO: 885085 - DNA, 75 bp, synthetic construct
  source 1..75: mol_type = other DNA
ccgcaatggcttcctgacagaccgcatcaccgtgctactggaacgcttctggacactcgggattatcgacccacc

SEQ ID NO: 885086 - DNA, 75 bp, synthetic construct
  source 1..75: mol_type = other DNA
tgctctcgcgctttaataacatcacggtgatgaccaacagtctgcatatcgtcaatgcgctatctgaactggata

SEQ ID NO: 885087 - DNA, 75 bp, synthetic construct
  source 1..75: mol_type = other DNA
ctgccgttagttttatccatgatggcgattcgatcattcttgatgctggcagtaccgttttgcagatggttcccc

SEQ ID NO: 885088 - DNA, 75 bp, synthetic construct
  source 1..75: mol_type = other DNA
gataaagcttcaggatcgttaggtaccctaaaattagttgagaaagacggtaagtactatgtaaatgacactaca

SEQ ID NO: 885089 - DNA, 75 bp, synthetic construct
  source 1..75: mol_type = other DNA
cagaaaaagagtactataagcaaagctgccgtagaaattactacgactaccactccatatactgaaggcaataat

SEQ ID NO: 885090 - DNA, 75 bp, synthetic construct
  source 1..75: mol_type = other DNA
tctgatgctaacggtaagttgtacgttaaagttgccggttcagataaatcccctgaaaatggttattatgaagtt

SEQ ID NO: 885091 - DNA, 75 bp, synthetic construct
  source 1..75: mol_type = other DNA
gcctgtcgctgttgacccagaataacctgaataaatctcagtcttctctgagctccgccattgaacgtctctctt

SEQ ID NO: 885092 - DNA, 75 bp, synthetic construct
  source 1..75: mol_type = other DNA
gctaaccgctttacttctaacatcaaaggtctgactcaggccgcacgtaacgccaacgatggtatttctctggcg

SEQ ID NO: 885093 - DNA, 75 bp, synthetic construct
  source 1..75: mol_type = other DNA
agtaaatgtagatgccgctacaggtaacacgtctgttattactgatcctaatggtaaggcagttgaatgggcagt

SEQ ID NO: 885094 - DNA, 75 bp, synthetic construct
  source 1..75: mol_type = other DNA
gggtctaccaatggttctactggtgcggatgctagccttgccatttcgggcgggggactttatgaagaaagtgct

SEQ ID NO: 885095 - DNA, 75 bp, synthetic construct
  source 1..75: mol_type = other DNA
gaccgaagtgtccaacatgtcgaaagcgcagatcatccagcaggcgggtaactccgtgctgtctaaagctaacca

SEQ ID NO: 885096 - DNA, 75 bp, synthetic construct
  source 1..75: mol_type = other DNA
gctaaccgtttcacctctaacattaaaggtctgactcaggcagctcgtaacgctaatgatggtatctccgttgcg

SEQ ID NO: 885097 - DNA, 75 bp, synthetic construct
  source 1..75: mol_type = other DNA
tgcaggaacaaaagtttatcaagtacaggtggaagggcagacttattttgttggtcaagataataataccaacac

SEQ ID NO: 885098 - DNA, 75 bp, synthetic construct
  source 1..75: mol_type = other DNA
gtctaacatgtctcgtgcgcagatcctgcaacaagcgggtacctctgttctggcacaggctaaccagaccacgca

SEQ ID NO: 885099 - DNA, 75 bp, synthetic construct
  source 1..75: mol_type = other DNA
aggcagcttccgttatcccaccattgcgatacagctcgttgaacccggcgtacgcatccgcttgcagcacactgt

SEQ ID NO: 885100 - DNA, 75 bp, synthetic construct
  source 1..75: mol_type = other DNA
aaaacatatcgatcattgggaggatttgatgaaaaatattttatgtattgtgaggatatagatctttgctggcgt

SEQ ID NO: 885101 - DNA, 75 bp, synthetic construct
  source 1..75: mol_type = other DNA
ttgctgagcaaaattaaaaataacgatcacaaccacaacactgttgacctcgggtatcagatttatcacggcaac

SEQ ID NO: 885102 - DNA, 75 bp, synthetic construct
  source 1..75: mol_type = other DNA
ggcaggcaaatgatcccaagcctcgccagcgtaattactccccgttttgatattggtcggatggccgcccaaatg

SEQ ID NO: 885103 - DNA, 75 bp, synthetic construct
  source 1..75: mol_type = other DNA
acccgccagtttgtgccactggccgctaatcctcgcgtttgtgccataccgctacgccaaccgaccgcagcgtaa

SEQ ID NO: 885104 - DNA, 75 bp, synthetic construct
  source 1..75: mol_type = other DNA
tttaccgtcaaaagctgcggcgatggtacgtgaaaacgtcattgctcagttggctaatttgcaaactcatccatc

SEQ ID NO: 885105 - DNA, 75 bp, synthetic construct
  source 1..75: mol_type = other DNA
caacgtgagcctggcgatctgttcgttattcgcaacgcgggcaatatcgtcccttcctacgggccggaacccggt

SEQ ID NO: 885106 - DNA, 75 bp, synthetic construct
  source 1..75: mol_type = other DNA
tggtttgaaataataaagtcacgagattaccttgagtctctggcaaaaacaattatttattacagtatcggtatg

SEQ ID NO: 885107 - DNA, 75 bp, synthetic construct
  source 1..75: mol_type = other DNA
taaatcaccgggtgatgaaagtgaaacacttacccgtagaaatgacgctatcttcggcaaccacgtatggcaaac

SEQ ID NO: 885108 - DNA, 75 bp, synthetic construct
  source 1..75: mol_type = other DNA
aagctcgcgcaggacatcattaaagctcaaaaaggtgaaattgagcagatgaataaatggcttgatagtcaaaag

SEQ ID NO: 885109 - DNA, 75 bp, synthetic construct
  source 1..75: mol_type = other DNA
gaaacgggccatacgctggtggtgacagcccgccatgcttcggcatgggcatctttgtggggaataaagcagttt

SEQ ID NO: 885110 - DNA, 75 bp, synthetic construct
  source 1..75: mol_type = other DNA
agcgctttttccggactgccacgttttgtgtctgtaaagctgggacgccggatcagcagcgcgtggcagacaaag

SEQ ID NO: 885111 - DNA, 75 bp, synthetic construct
  source 1..75: mol_type = other DNA
gcggttatttttatcgctatcattgcttcgctgctgctcgatttcaccctcggcccctcagggctccctttacat

SEQ ID NO: 885112 - DNA, 75 bp, synthetic construct
  source 1..75: mol_type = other DNA
gtgacacaacgcgaacccggcgatctgtttgttattcgcaacgcgggcaatatcgttccttcttatgggccggaa

SEQ ID NO: 885113 - DNA, 75 bp, synthetic construct
  source 1..75: mol_type = other DNA
gagtttgttaatagggggatatacacgtgacagtcgtacaaaggatgtccagaaaattccgttattgggggatat

SEQ ID NO: 885114 - DNA, 75 bp, synthetic construct
  source 1..75: mol_type = other DNA
gcacagacggtggggcaagacctggaaggtcaattgcgaacctatcagggcatcctgcagctcaacatcattgcg

SEQ ID NO: 885115 - DNA, 75 bp, synthetic construct
  source 1..75: mol_type = other DNA
aaagtttgtggcccgatgcctggcatttcctttctatttttagcggcagcgcatggttaatgaccctgctgtggc

SEQ ID NO: 885116 - DNA, 75 bp, synthetic construct
  source 1..75: mol_type = other DNA
ggtgcatcacccgcagacggaagcactgctctggcagcatgagaccagacatgcgtacaacgcgcaggggctggc

SEQ ID NO: 885117 - DNA, 75 bp, synthetic construct
  source 1..75: mol_type = other DNA
ctggaggttatcacgtctccaaaaagacctcgtcagcctgtcccggcaagtgacggttccgattacctgaaaact

SEQ ID NO: 885118 - DNA, 75 bp, synthetic construct
  source 1..75: mol_type = other DNA
ctaccacttcctcaagtactccaatcagtgatattaaagtaatttcttatcctgatacgaatagtctgttagtta

SEQ ID NO: 885119 - DNA, 75 bp, synthetic construct
  source 1..75: mol_type = other DNA
tggacgcgtcaggcggcggatctccattgatatgctggacgcgttacgcgatgcggaagcacaacttgcttcctg

SEQ ID NO: 885120 - DNA, 75 bp, synthetic construct
  source 1..75: mol_type = other DNA
cggcatcattgacctcgccggtaccgctcatgatctcaatgcgcgcctccgttttgctcctgctgaccccctcag

SEQ ID NO: 885121 - DNA, 60 bp, synthetic construct
  source 1..60: mol_type = other DNA
atgacacaatatcttgacaacatccgtcactgtctgtcagaaaatgtactgccaaatata

SEQ ID NO: 885122 - DNA, 75 bp, synthetic construct
  source 1..75: mol_type = other DNA
ttacagcacgcacggacgtcaaacatgatctgcgtgcgcgaatatttccccgataccttttcgactgcagttcga

SEQ ID NO: 885123 - DNA, 75 bp, synthetic construct
  source 1..75: mol_type = other DNA
tgtgtgtctatacgggtggccagcggcctcatgaactggtttccagccgttgggatgccgttaactgggaagaaa

SEQ ID NO: 885124 - DNA, 75 bp, synthetic construct
  source 1..75: mol_type = other DNA
tgattagtggcttgaagccgaagactactgcttattatgaatgggataaaagtggtgagcgtggggcagggcgat

SEQ ID NO: 885125 - DNA, 75 bp, synthetic construct
  source 1..75: mol_type = other DNA
aatccatcaatgcggatggcagtcgttatggtgatcccaggcgttcacgtattgcgtcattctggatggagggtc

SEQ ID NO: 885126 - DNA, 75 bp, synthetic construct
  source 1..75: mol_type = other DNA
agggcgacatgacgcagtatggcggtagcattgtccagggttctgccggggtacgtattggtgcccccaccggcg

SEQ ID NO: 885127 - DNA, 75 bp, synthetic construct
  source 1..75: mol_type = other DNA
tataaaagagatgcctttcggcaaaagaaagatctatagtttagcttgccttttatcagctgtttctgatgagga

SEQ ID NO: 885128 - DNA, 75 bp, synthetic construct
  source 1..75: mol_type = other DNA
agcattattagaataatggaaccaatttattcatttcaacactcctattctgaggagaaaagggggttaaacaaa

SEQ ID NO: 885129 - DNA, 75 bp, synthetic construct
  source 1..75: mol_type = other DNA
ggtgacctgatgcgccgtgaggatgacaaaggtcaggataagctcaacgatctgtaccataaaataatcagcctg

SEQ ID NO: 885130 - DNA, 75 bp, synthetic construct
  source 1..75: mol_type = other DNA
ataagggccaggacaagctcaatgagatttaccacaaggtaatcagcatgcctgagcgcgttaagtccgttaagg

SEQ ID NO: 885131 - DNA, 75 bp, synthetic construct
  source 1..75: mol_type = other DNA
agcatggacgaaggcgaaaaagataaggtcgttgacgcgctgtctgacctgatggattcgctctctcagggggcg

SEQ ID NO: 885132 - DNA, 75 bp, synthetic construct
  source 1..75: mol_type = other DNA
gagtctccgcttaagcccgcatgtgtacctggcgacaaacagccttcaggggccgtggtggatactcggctggcc

SEQ ID NO: 885133 - DNA, 75 bp, synthetic construct
  source 1..75: mol_type = other DNA
gccggacttattctggggttaatcctcattcttggcggtgagatgatcgggcgtgtgctcttttatggcctgcac

SEQ ID NO: 885134 - DNA, 75 bp, synthetic construct
  source 1..75: mol_type = other DNA
ttgcctctgtcatgcacctgggatcgccactgcgagcgtttaactcgctgaatcgaatcggagcttctggtctga

SEQ ID NO: 885135 - DNA, 75 bp, synthetic construct
  source 1..75: mol_type = other DNA
gatgcggtgggcaggcttaaggcacagacggatgccgcaggccggacaacagaatacagcccggatgtggtgacg

SEQ ID NO: 885136 - DNA, 75 bp, synthetic construct
  source 1..75: mol_type = other DNA
acccggacagcaccttcacggcgtggccggataaccgcatcgcggaggatgcgcactatgtctaccgccacgatg

SEQ ID NO: 885137 - DNA, 75 bp, synthetic construct
  source 1..75: mol_type = other DNA
gcagcgagtatgatgaggcgggggggctgaaggcgcagacggatgcggcgggacggcggacggagtaccggctgc

SEQ ID NO: 885138 - DNA, 75 bp, synthetic construct
  source 1..75: mol_type = other DNA
ggcgacatcatgtttgaccccgacgataaagggcgggaccggctcaatgaaatttatcagaaagtgatcagcctg

SEQ ID NO: 885139 - DNA, 75 bp, synthetic construct
  source 1..75: mol_type = other DNA
atcttctgtctcagacacgaatatataagaaaagaatcagaaaaacgaaaaaaggactttttcaagaaaaaagaa

SEQ ID NO: 885140 - DNA, 75 bp, synthetic construct
  source 1..75: mol_type = other DNA
taaatggtgatagtgacaatatggggaaaaatataatgtcccaattgttaagtaattcatttgtaattatagtta

SEQ ID NO: 885141 - DNA, 75 bp, synthetic construct
  source 1..75: mol_type = other DNA
agctcgaagtgaaatatcctgatctactaaaggaaatactgcgttatattactgtacagcgcatatctgaagtaa

SEQ ID NO: 885142 - DNA, 75 bp, synthetic construct
  source 1..75: mol_type = other DNA
gtataataaatattttactataggtaaagcagatgtactttcacagcttagcaatgaatcaattcgagcaacatc

SEQ ID NO: 885143 - DNA, 75 bp, synthetic construct
  source 1..75: mol_type = other DNA
tgtacaataatcaaaaaaatattgtgtttgttattactaagtctgaagtcggtggggcccaaacttgggtttcac

SEQ ID NO: 885144 - DNA, 75 bp, synthetic construct
  source 1..75: mol_type = other DNA
aataaagaaaaaaaattttggcatattatgccaaaagtgttaaggctagtttttgtaggccgaatgactcacccg

SEQ ID NO: 885145 - DNA, 75 bp, synthetic construct
  source 1..75: mol_type = other DNA
ggtataactaagccatggcatgattgggcgaactacgcctctgcagattattttcgtaatatttataatatatca

SEQ ID NO: 885146 - DNA, 75 bp, synthetic construct
  source 1..75: mol_type = other DNA
caaaaaaatactcaagtcaattatcctactggtctctacgtcccctactccaccagaactcacctggaagacgct

SEQ ID NO: 885147 - DNA, 75 bp, synthetic construct
  source 1..75: mol_type = other DNA
atataatttggcacataccgcaaccaactcccaccttaaaccaactggtccggataattcagatgttctcctgtt

SEQ ID NO: 885148 - DNA, 75 bp, synthetic construct
  source 1..75: mol_type = other DNA
cgttatttcaccagagatagaagagcgaataagagacggagttagaccaacggcaggtggaactttcttaaatct

SEQ ID NO: 885149 - DNA, 75 bp, synthetic construct
  source 1..75: mol_type = other DNA
gtttttatgggggcgttctatattgatcggatcctcagtttttcaacctttccggcagtgctgctgataaccacc

SEQ ID NO: 885150 - DNA, 75 bp, synthetic construct
  source 1..75: mol_type = other DNA
atgtatgcaaaacactgggacattaacgcttatcacactcgcgttgccgacctctgccaatttgcggcaagcaag

SEQ ID NO: 885151 - DNA, 75 bp, synthetic construct
  source 1..75: mol_type = other DNA
tgccccggcggggtgacgtccggccatccggtcaatccgctgctcggtgcaaaggtccttcccggtgaaaccgac

SEQ ID NO: 885152 - DNA, 75 bp, synthetic construct
  source 1..75: mol_type = other DNA
tgcagagtggaccttccagttggcgctgaatgttgcaacgccgtttgtgctggttggattaggactgatattccc

SEQ ID NO: 885153 - DNA, 75 bp, synthetic construct
  source 1..75: mol_type = other DNA
atcagaaaatcctgcaaagcaggaacagcagcaggaacagcagcaggaacagccggaattaaaagcggaaaagaa

SEQ ID NO: 885154 - DNA, 75 bp, synthetic construct
  source 1..75: mol_type = other DNA
aaaatagttaccgaaggtgacaaatccagcgtggtaaataatccaaccggcagaaaacgccccgctgaaaagtaa

SEQ ID NO: 885155 - DNA, 75 bp, synthetic construct
  source 1..75: mol_type = other DNA
agccgacattaaaatcagaagaagcaactggctccggtaaaccatctgacaaaacacagccttctgccactcctg

SEQ ID NO: 885156 - DNA, 75 bp, synthetic construct
  source 1..75: mol_type = other DNA
gttaaatttaagtttgattcattgaatccagtaaatggcttaaagcgtatatttggcttaaaaaccgtaaaggaa

SEQ ID NO: 885157 - DNA, 75 bp, synthetic construct
  source 1..75: mol_type = other DNA
cttaattcggtagtgatgccgctgcgttatttatgggtatttgttgcatttattgcagtcgttcgcctggcgcag

SEQ ID NO: 885158 - DNA, 75 bp, synthetic construct
  source 1..75: mol_type = other DNA
gtcggtaatggctacacccttccccgcgcggaccttttaagcaatggacacatgcggcgcgaaatagggtcactg

SEQ ID NO: 885159 - DNA, 75 bp, synthetic construct
  source 1..75: mol_type = other DNA
tcacggcgaccccaagatcaggtggcgctatttaccaaacgcaagtacgggtgaagggctggtgggtgaatcacg

SEQ ID NO: 885160 - DNA, 75 bp, synthetic construct
  source 1..75: mol_type = other DNA
atgagttttcaagctctgcctcctgggtcgatgttgatgctatcggtaaagtgacatttaaaaatgtcggcagca

SEQ ID NO: 885161 - DNA, 75 bp, synthetic construct
  source 1..75: mol_type = other DNA
cattatatggacgctgatttttattcagaaatatattggtcttctaataccgcaggtggaggccgacaatacatt

SEQ ID NO: 885162 - DNA, 75 bp, synthetic construct
  source 1..75: mol_type = other DNA
agtctggcatcgcgcaggccactctcgcaggcgttgcctttggtgagcagacggtcactgcatcactggctaata

SEQ ID NO: 885163 - DNA, 75 bp, synthetic construct
  source 1..75: mol_type = other DNA
taacaacggcttgggttggcgtcatttcactcccacatggatgtcgggcatcaacttctttttcgaccacgatct

SEQ ID NO: 885164 - DNA, 75 bp, synthetic construct
  source 1..75: mol_type = other DNA
accaggacggcgagctggatgtcagcggcggtggtcacggggttgatatcaccggcgacagcgcaacggtggata

SEQ ID NO: 885165 - DNA, 75 bp, synthetic construct
  source 1..75: mol_type = other DNA
gccgttctggccagcactcgtggcctgcctgcggtggctaccggcgtgcgcgccatcggtgcggcgttcatttcc

SEQ ID NO: 885166 - DNA, 75 bp, synthetic construct
  source 1..75: mol_type = other DNA
cgctatgatgtgggagggaatttttagaaaggtagctaatggtggcgcgcccgttcaggccgggatagtcttaaa

SEQ ID NO: 885167 - DNA, 75 bp, synthetic construct
  source 1..75: mol_type = other DNA
cgtaggtttattgcgtgaagctatggatttgcacggctttaattttatcttcgttcccgtgctttctggaaggga

SEQ ID NO: 885168 - DNA, 75 bp, synthetic construct
  source 1..75: mol_type = other DNA
acacaaagagtcggcttgaagacatgatgcgtgagttaagccatcgacataacctcgcaacacagccacacaaag

SEQ ID NO: 885169 - DNA, 75 bp, synthetic construct
  source 1..75: mol_type = other DNA
caagctgagcttgtgcgccttggtgatgctattaattacctggacgaccaaaacaccgttaaaggcggtgagctt

SEQ ID NO: 885170 - DNA, 75 bp, synthetic construct
  source 1..75: mol_type = other DNA
gatgacgcaggaccagatgaacgttctggccgacaagatcaactacctgggcaacaacaccgccgcatcagccaa

SEQ ID NO: 885171 - DNA, 75 bp, synthetic construct
  source 1..75: mol_type = other DNA
gttaatgtgcattttctcaggctaagggctgcagattgtaaattttgccagttgaatggtaaatatttttgctca

SEQ ID NO: 885172 - DNA, 75 bp, synthetic construct
  source 1..75: mol_type = other DNA
gatgagctcgatacagcaccgaaaggtgcggacctttttaaagtgtcacctttgtcaatgagtccctatttcgca

SEQ ID NO: 885173 - DNA, 75 bp, synthetic construct
  source 1..75: mol_type = other DNA
gaacagtccgatctgcaaaatcagttgcgcaacctagagcgccaacaacggcgtcaacgtcagcaagtttttgat

SEQ ID NO: 885174 - DNA, 75 bp, synthetic construct
  source 1..75: mol_type = other DNA
acgcatcagtgataaaagtagctgcaatattcgtgcgtaaaaggatgggcggtaaatcatggtcctgtcacgacc

SEQ ID NO: 885175 - DNA, 75 bp, synthetic construct
  source 1..75: mol_type = other DNA
aactccctaagtaatcttatatctctcattggaactaaatcaggaacacaagaacgagagttacaggaaaaatca

SEQ ID NO: 885176 - DNA, 75 bp, synthetic construct
  source 1..75: mol_type = other DNA
tttacatggacagatgccatcgaccatggtacggaaatgaccgcgacccgtgatggtgttcgtggaaaagaaaaa

SEQ ID NO: 885177 - DNA, 75 bp, synthetic construct
  source 1..75: mol_type = other DNA
atcaaagggttggcgatgagcggttttggcccggtaacgcagatttatatcggcggcaaaaataaacgcgtcatg

SEQ ID NO: 885178 - DNA, 75 bp, synthetic construct
  source 1..75: mol_type = other DNA
cgcggcattcaaatctccgccgggaatgctctctcctttgtggcgctgactaacattgagatgaagcgtgcgtcg

SEQ ID NO: 885179 - DNA, 75 bp, synthetic construct
  source 1..75: mol_type = other DNA
ctgtcagccacgctaattacgccatcttacgccagggatttcataatcagattatcggtgccaacatcaccaact

SEQ ID NO: 885180 - DNA, 75 bp, synthetic construct
  source 1..75: mol_type = other DNA
tactcaggcggcagtcccgaaattgatgtgtttgccggatacatcgtggggtggcgggtctcatcgtttatggaa

SEQ ID NO: 885181 - DNA, 75 bp, synthetic construct
  source 1..75: mol_type = other DNA
gggtatcattggcaatatgccagcatacgggtatcgccgtgtctgagcgatactcaggcggcagtcccgaaattg

SEQ ID NO: 885182 - DNA, 75 bp, synthetic construct
  source 1..75: mol_type = other DNA
atgctgtctcctttgtggcgctgactaacattgagatgaagcgtgcgtcattggagttacacaacaagccgcaac

SEQ ID NO: 885183 - DNA, 75 bp, synthetic construct
  source 1..75: mol_type = other DNA
gatgacgatgaattcagcggcgatgaaactcaaaaaaaatgggagtggagtcgctactatgcctggcgggcgtta

SEQ ID NO: 885184 - DNA, 75 bp, synthetic construct
  source 1..75: mol_type = other DNA
gcgataactaccaggccgggcttgtcggtaccgggtggaaccttccctttggcgcggtctcgtttgatgtcaccc

SEQ ID NO: 885185 - DNA, 75 bp, synthetic construct
  source 1..75: mol_type = other DNA
caacaccacgtccgtgcctgcgcccgccattgcgcacgggcaggttcagctgcgcgatctggttcagggcggtga

SEQ ID NO: 885186 - DNA, 75 bp, synthetic construct
  source 1..75: mol_type = other DNA
ccggaactgaaatcgcgggtaataacgcggtggtgaaccaggacggcgagctggatgtgagcggcggtggtcacg

SEQ ID NO: 885187 - DNA, 75 bp, synthetic construct
  source 1..75: mol_type = other DNA
ggctggcggtaatgatgagcaggcaatgtataatgttacgcaagaagccgctcgaattctgcacgaagctgaaac

SEQ ID NO: 885188 - DNA, 75 bp, synthetic construct
  source 1..75: mol_type = other DNA
ccccacgggtttcgtggaaagaacaggatgaagacgagccgaggaaggtgacggattattatcgtcatataaatc

SEQ ID NO: 885189 - DNA, 75 bp, synthetic construct
  source 1..75: mol_type = other DNA
ctggtataacaatcgacgattgctgggaagactgggccatactcctccggcagaagctgaaaaagcttattatgc

SEQ ID NO: 885190 - DNA, 75 bp, synthetic construct
  source 1..75: mol_type = other DNA
cacccaaacatgtctgcgatttgctggcacagcaggagatggcaaatcagaataacccattatcagttttcattc

SEQ ID NO: 885191 - DNA, 75 bp, synthetic construct
  source 1..75: mol_type = other DNA
tttacaactttgtatgcgtgttaccaaaaaacttactgataatattaattcatccctgaagggggggtataaatg

SEQ ID NO: 885192 - DNA, 75 bp, synthetic construct
  source 1..75: mol_type = other DNA
ctacctcggtttttcgccacaaaaaacgatcccgtcgccgttcgtcgtcgttaacgacgctgaacaggtcgttac

SEQ ID NO: 885193 - DNA, 75 bp, synthetic construct
  source 1..75: mol_type = other DNA
ctggtactgaacagttgaatatcacccttgattcaaataaagatatcacggcccgttcggttaagccttatgatt

SEQ ID NO: 885194 - DNA, 75 bp, synthetic construct
  source 1..75: mol_type = other DNA
cgtagtgatacgacatctatgaatagtgtgaaagcttttctatcaagtgaacccgtttctaatggttttgttggc

SEQ ID NO: 885195 - DNA, 75 bp, synthetic construct
  source 1..75: mol_type = other DNA
atttcggatggagttaattaaggagttacctgaaatagcattattacgtgtgctttataatacgcgtaatactat

SEQ ID NO: 885196 - DNA, 75 bp, synthetic construct
  source 1..75: mol_type = other DNA
ttttatcagtgaggagcattggttctcactgctggaaaaggtgagtgcttttgatgaggtcagacaatgggctga

SEQ ID NO: 885197 - DNA, 75 bp, synthetic construct
  source 1..75: mol_type = other DNA
tatactgaatcgactggagtttattgacagaagatttcgggaattcatcagcactatgtctgaatataattgtaa

SEQ ID NO: 885198 - DNA, 75 bp, synthetic construct
  source 1..75: mol_type = other DNA
tactgctgataatgtgatgattgtgactcgtcatggtcgaatcataaaaacggtgggtctagaaaatgatctcgt

SEQ ID NO: 885199 - DNA, 75 bp, synthetic construct
  source 1..75: mol_type = other DNA
ggtaacggatgcggacggcaaaaccgtccagaagattttcacccccacgcagcaggactggcagaccaacctgtt

SEQ ID NO: 885200 - DNA, 75 bp, synthetic construct
  source 1..75: mol_type = other DNA
tgataaatctaaagacaagtgggagaaagaattgtctgaatatccaccggaaaaaatatatcaggtccggagaga

SEQ ID NO: 885201 - DNA, 75 bp, synthetic construct
  source 1..75: mol_type = other DNA
ttgatgtggtcagacaatgggctgaaaatggtggggcatattatcctctgctggagtgccgtcggcttacagata

SEQ ID NO: 885202 - DNA, 75 bp, synthetic construct
  source 1..75: mol_type = other DNA
atgggataacttttgatgatcagcgaaaacgttacattataggaccgataacagtctctattgatgaaatgacca

SEQ ID NO: 885203 - DNA, 75 bp, synthetic construct
  source 1..75: mol_type = other DNA
cagccgtgtgtcaacgggctgttacgatattaaggatccacggcttggtatgctgctgatgacgcaaccggaacc

SEQ ID NO: 885204 - DNA, 75 bp, synthetic construct
  source 1..75: mol_type = other DNA
cagtgcgtcagaaagatggagtggataaagccagaaacgaactggaggaatgtcttaaaaatcagcccattaaac

SEQ ID NO: 885205 - DNA, 75 bp, synthetic construct
  source 1..75: mol_type = other DNA
gccttggcctgtcaggatatgtatgatgttgaaattgatgatggcgttatcgttcctgtgtcacaatttcacata

SEQ ID NO: 885206 - DNA, 75 bp, synthetic construct
  source 1..75: mol_type = other DNA
acgtgaggggctttcacctcgggtcagttacggaaaaggcgctgagggtttttcacttgtctggacagcacctgg

SEQ ID NO: 885207 - DNA, 75 bp, synthetic construct
  source 1..75: mol_type = other DNA
caagggaatgaaagtctggaggttaaacagagccgcggtgttcgtgacagtgggcagggaattccggttccactg

SEQ ID NO: 885208 - DNA, 75 bp, synthetic construct
  source 1..75: mol_type = other DNA
cggtactgcgaacataccgccaggagtgctgctgtgatgcagttgtttatcactcctgactcaaccgttattacg

SEQ ID NO: 885209 - DNA, 75 bp, synthetic construct
  source 1..75: mol_type = other DNA
cagttggcagtagagccggtagtacctgatgacgttctggaacagacagtagcgtcgcccgcgccaggtaaccag

SEQ ID NO: 885210 - DNA, 75 bp, synthetic construct
  source 1..75: mol_type = other DNA
tgcaatggctggctaacatttatggccgtgatgacattgacgatatagacggcggtgagattcgtgagctggcac

SEQ ID NO: 885211 - DNA, 75 bp, synthetic construct
  source 1..75: mol_type = other DNA
atataataaatattttactataggtaaagcagatgtactttcacagcttgttaatcaatcaactcaagcatcact

SEQ ID NO: 885212 - DNA, 75 bp, synthetic construct
  source 1..75: mol_type = other DNA
cgtgctatgggatgaagaatgtaagagccttaagaaatcgcttcagaaagcagtacgccagaaagagggagtgga

SEQ ID NO: 885213 - DNA, 75 bp, synthetic construct
  source 1..75: mol_type = other DNA
atgctaggtaatcttcctcaattgctcaatggggcgtcatgcacaattatcgtgctgacactttttttctatcgc

SEQ ID NO: 885214 - DNA, 75 bp, synthetic construct
  source 1..75: mol_type = other DNA
ccgattagatgaagaaaatatacgatgcaagtataagacagcagtagacgatttcatgcaagagcgtttttctga

SEQ ID NO: 885215 - DNA, 75 bp, synthetic construct
  source 1..75: mol_type = other DNA
tatgtcatttccaaaatagagggaaataattcaattttatcaatctacaatcttcttttttatatttttaatggg

SEQ ID NO: 885216 - DNA, 75 bp, synthetic construct
  source 1..75: mol_type = other DNA
atggttcacaaatctgacagcgatgaattatcggcactgcgggcagaaaatgctcgaatcatcaagcccctgtta

SEQ ID NO: 885217 - DNA, 75 bp, synthetic construct
  source 1..75: mol_type = other DNA
caatactgtctatctgcgagatctggagaaatatggcatcactgctgaggacgtgtctcaaccaggttgctattc

SEQ ID NO: 885218 - DNA, 75 bp, synthetic construct
  source 1..75: mol_type = other DNA
gcggattaaatggggaaaaaatttctgactatcatatcgatagtaataagccgatgcccggtatctatgatatgg

SEQ ID NO: 885219 - DNA, 75 bp, synthetic construct
  source 1..75: mol_type = other DNA
acaacctgccggaaaacgccgaagccacccagtccgtggtgcaggccacgcttaccgaaggggccattggctacc

SEQ ID NO: 885220 - DNA, 66 bp, synthetic construct
  source 1..66: mol_type = other DNA
atgattagctttcgtagatactgttatggcctgcaagttttttcctggtccggtttcccggattgc

SEQ ID NO: 885221 - DNA, 75 bp, synthetic construct
  source 1..75: mol_type = other DNA
cgcgggtaacaacgcggtggtgaaccaggacggcttactggatgtgagcggcggcggtcacggcattgatatcac

SEQ ID NO: 885222 - DNA, 75 bp, synthetic construct
  source 1..75: mol_type = other DNA
caagttattggcaccactacgccatataaataacgacggaaataaaatattgatattaaattatcttataacgaa

SEQ ID NO: 885223 - DNA, 75 bp, synthetic construct
  source 1..75: mol_type = other DNA
actgcataattatatggagatgtgttatacactttttgatagctatccaaatttaatcactgaatgtaatgactt

SEQ ID NO: 885224 - DNA, 75 bp, synthetic construct
  source 1..75: mol_type = other DNA
ttcacagaggatatttaaatcaacatagtttaatcaggcatcgctgcgtccaacacgcactgattaacatcatct

SEQ ID NO: 885225 - DNA, 75 bp, synthetic construct
  source 1..75: mol_type = other DNA
aaaagtgacgagagcagcggtaaatggaagagtaacacgttatatctggagcgcggaattccacaaattcttggc

SEQ ID NO: 885226 - DNA, 75 bp, synthetic construct
  source 1..75: mol_type = other DNA
acaaaaaaatccgttatattttgctgaagcagcaaagtatattatagaaaataacttaatacctgattcagtttt

SEQ ID NO: 885227 - DNA, 75 bp, synthetic construct
  source 1..75: mol_type = other DNA
ataaaatggataaaagatatagttttagtgttgaagttacaacatgatgatttatcgaaatgtatcagcccactt

SEQ ID NO: 885228 - DNA, 75 bp, synthetic construct
  source 1..75: mol_type = other DNA
cggatggcgggaatgtcgtatttgatgaaaacgcgataaccgagatccagagttcagtgagaaatactgagtcta

SEQ ID NO: 885229 - DNA, 75 bp, synthetic construct
  source 1..75: mol_type = other DNA
aggcgcagcctgcggcgttgttttccagcacccgacagagaaaacgctctatctggctggcgataccctctggcg

SEQ ID NO: 885230 - DNA, 75 bp, synthetic construct
  source 1..75: mol_type = other DNA
aacaagaaatcagcatcattaacctcgaccagcttgtgtccatgacctcagttgaaattgctgagctgacaggca

SEQ ID NO: 885231 - DNA, 75 bp, synthetic construct
  source 1..75: mol_type = other DNA
aacggctatttgcgactgaccaactggcgcagcgcacctgaactggacaacgattatgaagctcgcccggccaat

SEQ ID NO: 885232 - DNA, 75 bp, synthetic construct
  source 1..75: mol_type = other DNA
atgtcgggcatcaacttctttttcgaccacgatcttagccgttaccactcccgcgccggcattggcgcggagtac

SEQ ID NO: 885233 - DNA, 75 bp, synthetic construct
  source 1..75: mol_type = other DNA
cggaaatcatgatcaacctggccgggaacctgaccgccaaagcccggcagtacggcgcaaatatgtcgcagttcg

SEQ ID NO: 885234 - DNA, 75 bp, synthetic construct
  source 1..75: mol_type = other DNA
acggaattgatgtttttaaaaaggggacaagagagttaaagctaccgtttgaactgatgcaggaaattatcaaac

SEQ ID NO: 885235 - DNA, 75 bp, synthetic construct
  source 1..75: mol_type = other DNA
agagtactttctcaatatcccaagaattaaacaacgaaatggatatagaaaagagtttagaaaattacaaattcc

SEQ ID NO: 885236 - DNA, 75 bp, synthetic construct
  source 1..75: mol_type = other DNA
ggttatcagtgaagacggcaatacggcgtggagcacggaatatgatgagtggggcaaccagcttgatgaggagaa

SEQ ID NO: 885237 - DNA, 75 bp, synthetic construct
  source 1..75: mol_type = other DNA
tacttaaaaccgatataagcagattttaccactcaatatacactcatagtattgcatggacttaccatacaaaag

SEQ ID NO: 885238 - DNA, 75 bp, synthetic construct
  source 1..75: mol_type = other DNA
cgtggtctggacatgctcagtaatcgctatacaacgatgattgccggccttgccagcggcgcagcgctgagagaa

SEQ ID NO: 885239 - DNA, 75 bp, synthetic construct
  source 1..75: mol_type = other DNA
aatactgtaataattacagcgaccccaagatccggtggcgctatttaccaaacgcaagtacgggtgaaaggctgg

SEQ ID NO: 885240 - DNA, 75 bp, synthetic construct
  source 1..75: mol_type = other DNA
catagcgctaataatgtctgctttacataaaatattgacagccacagggtcatattcaataatatcaacacactc

SEQ ID NO: 885241 - DNA, 75 bp, synthetic construct
  source 1..75: mol_type = other DNA
catcaggcgatagaagatttgcttcaagaaaaaaaagtattacaaaatgctattgctgatgcaggaaaactagga

SEQ ID NO: 885242 - DNA, 75 bp, synthetic construct
  source 1..75: mol_type = other DNA
ggaagatgtgaaggcgaacttcacgctgagcgatggcggtaaagcgattactgatgctgaaggcaaagcgaaagt

SEQ ID NO: 885243 - DNA, 75 bp, synthetic construct
  source 1..75: mol_type = other DNA
gtcgaatcgttgcgggttcgatgatcttggtcggcattgtcggcggtatcgctcgccagagcctcatggcttttg

SEQ ID NO: 885244 - DNA, 75 bp, synthetic construct
  source 1..75: mol_type = other DNA
cgggagtatcagaatgaggccctataacggttcatctgcaggcagtgttcagaccacagtgaatttcagcctgaa

SEQ ID NO: 885245 - DNA, 75 bp, synthetic construct
  source 1..75: mol_type = other DNA
tcgcagtaggctactttaacgaatggaagggacttcccctagatatgcgcctgattaactttcgtgcaatcatag

SEQ ID NO: 885246 - DNA, 75 bp, synthetic construct
  source 1..75: mol_type = other DNA
taatatcaggccagatgctgaatcacacactttctttgctggaatgatggcaagaagcgatgactcgcaggcaaa

SEQ ID NO: 885247 - DNA, 75 bp, synthetic construct
  source 1..75: mol_type = other DNA
gccgcttaacagcgggtatctgtctgataactcaacttgcgttccctatggctgcggcagcacaaggtgtggtaa

SEQ ID NO: 885248 - DNA, 75 bp, synthetic construct
  source 1..75: mol_type = other DNA
gcgggaatagcggtgaacttcaccatgccacagggcgtggcggcaaactttaccctcgaaaataacggcattgcc

SEQ ID NO: 885249 - DNA, 75 bp, synthetic construct
  source 1..75: mol_type = other DNA
tcaatgaaacaggagcaaccattaatttgcatggtgcaggaacctatggtgtttccgcttcaaaaggaacggcga

SEQ ID NO: 885250 - DNA, 75 bp, synthetic construct
  source 1..75: mol_type = other DNA
tcactgaaaggggactttaccgatagtgctgagctacatcttgttttgcacgatatatcaggcaatccgatcaaa

SEQ ID NO: 885251 - DNA, 75 bp, synthetic construct
  source 1..75: mol_type = other DNA
aaaaaagcgggtacgcatacggttaccgcaacgctgggtaataacaataccagtgattcgcagccggtaacgttt

SEQ ID NO: 885252 - DNA, 75 bp, synthetic construct
  source 1..75: mol_type = other DNA
cttcaatcaattctgttatgagttatatagaaaatacagcggaaaatggcaagagaattaatgaagctgtaaatg

SEQ ID NO: 885253 - DNA, 75 bp, synthetic construct
  source 1..75: mol_type = other DNA
tatttacaaatgaagatgaagagaaaaactccgttcgctggaatccgaatgttctttttgaaggtaacggtctta

SEQ ID NO: 885254 - DNA, 75 bp, synthetic construct
  source 1..75: mol_type = other DNA
aaagtcatatcttatcaagcctcattctagcttgatcataaatgctcaaaaaaaatcattcataaaaaaaaggat

SEQ ID NO: 885255 - DNA, 75 bp, synthetic construct
  source 1..75: mol_type = other DNA
cattacttaaattatgcgttaaatttaattggtgatgattgcatctcttcttttaatatttcatgcgcggaaaca

SEQ ID NO: 885256 - DNA, 75 bp, synthetic construct
  source 1..75: mol_type = other DNA
ttggaggaacgctgagtccaacaaacaaaaatactccctgggaagtaaaaaccggtaatgctgtaactggtctgg

SEQ ID NO: 885257 - DNA, 75 bp, synthetic construct
  source 1..75: mol_type = other DNA
acctggtcctgaaaaagctgccagatgggcgggtgatctatgtggaaggtatcagatgtgcccataattactttt

SEQ ID NO: 885258 - DNA, 75 bp, synthetic construct
  source 1..75: mol_type = other DNA
ctattgctttaatttctctaagtcagtatgcaagcgcatcttcagaatttaatttcttatctgacaatgtttttg

SEQ ID NO: 885259 - DNA, 75 bp, synthetic construct
  source 1..75: mol_type = other DNA
cctggtcaccgtccgtctcctgttacggaatctgagcggggaatgctgcttgccggtggctggctgggaataagt

SEQ ID NO: 885260 - DNA, 75 bp, synthetic construct
  source 1..75: mol_type = other DNA
gtaacgataacaacgttcatgaccgcacgtttcttgccggaaactacctcaagattggctggccctccgtcaaca

SEQ ID NO: 885261 - DNA, 75 bp, synthetic construct
  source 1..75: mol_type = other DNA
gctcggtgagtggttttacgaggagctgacttatgaggagcggggcagcgacggaaaatggcgcaagccaggtaa

SEQ ID NO: 885262 - DNA, 75 bp, synthetic construct
  source 1..75: mol_type = other DNA
cgatttcctgaagatatcaatggcgaaggtgatggtttctctctggcttcaaaacgtaccaccacatttatgtca

SEQ ID NO: 885263 - DNA, 75 bp, synthetic construct
  source 1..75: mol_type = other DNA
ctggtgcagatgacacaggataaggcgcaggagcactccaaaaagcgcctggcaagaacatttcgttgcagcccg

SEQ ID NO: 885264 - DNA, 75 bp, synthetic construct
  source 1..75: mol_type = other DNA
ctgggatttacttttgtctgacgtgttcgaaaagtcatggcccttagcgagtaacccgtcaaaacgcatgcggct

SEQ ID NO: 885265 - DNA, 75 bp, synthetic construct
  source 1..75: mol_type = other DNA
tattaatggtttatcaactaatagccagctaattatcggctcagtttcatttgaaagagaaacgaatcagtttaa

SEQ ID NO: 885266 - DNA, 75 bp, synthetic construct
  source 1..75: mol_type = other DNA
cctacctgcaactggccccgttcggcctgtccgacttccgcgccctggacctcgcccgcgagcgccaggcgcacg

SEQ ID NO: 885267 - DNA, 75 bp, synthetic construct
  source 1..75: mol_type = other DNA
aaacgctcgatcagctctgctggcgcatcttcgggcgcactgccgggattgtcgaacagctttaccagaacaacc

SEQ ID NO: 885268 - DNA, 75 bp, synthetic construct
  source 1..75: mol_type = other DNA
cttaccacgcttggaattgggccggtatattctaattttgttagtcgttcaaataatgaaaggttaatatccaat

SEQ ID NO: 885269 - DNA, 75 bp, synthetic construct
  source 1..75: mol_type = other DNA
ctaccaatttttataaacacatatccattcaaaaaaggatgtgttgagctaaacatgattgaaagtggtggatta

SEQ ID NO: 885270 - DNA, 75 bp, synthetic construct
  source 1..75: mol_type = other DNA
agtgcaataaacttactaataaaagatggcattgatagtctcttcaatgacttgataaattacgaggtgataaat

SEQ ID NO: 885271 - DNA, 75 bp, synthetic construct
  source 1..75: mol_type = other DNA
gcccattgaagctaaaagacatcctgacactacggtaactgaaactatcaaaatccctaccaagaaagctaagaa

SEQ ID NO: 885272 - DNA, 75 bp, synthetic construct
  source 1..75: mol_type = other DNA
gacattgccctggccggggcgatgcatgtcggggattttgcctccgggctggaggtgacaggtaagaacaatgac

SEQ ID NO: 885273 - DNA, 75 bp, synthetic construct
  source 1..75: mol_type = other DNA
ccatgacggcactgcttggccgtgtgcccatcaacggcactgtgaccgatccttatccgttcaaggtgcttatcg

SEQ ID NO: 885274 - DNA, 75 bp, synthetic construct
  source 1..75: mol_type = other DNA
gatgaactgaaggcgctgggtgtggaaggcgacacgccggaggacaccctgcgcacgctcatcggccggctgaac

SEQ ID NO: 885275 - DNA, 75 bp, synthetic construct
  source 1..75: mol_type = other DNA
actgcccctctatttgttgattcatcgttaattgttgctacaggaaatcagtctgttattcagaacaaaggcatt

SEQ ID NO: 885276 - DNA, 75 bp, synthetic construct
  source 1..75: mol_type = other DNA
cgtcaaggcagatagcagtctacaacttccacaagatatcagtgacacttcgcttaaccgttaccgtcaagcagt

SEQ ID NO: 885277 - DNA, 75 bp, synthetic construct
  source 1..75: mol_type = other DNA
caaaagagcgtgaaattagaaaatctattgaattcaggagcgaactgaataacttcacaaacatcatgaaacaac

SEQ ID NO: 885278 - DNA, 75 bp, synthetic construct
  source 1..75: mol_type = other DNA
ccccgcagatactcaacttagtcagagcaaaagcaatactaacgacagtggtgtggccgaagttacctttaaggg

SEQ ID NO: 885279 - DNA, 75 bp, synthetic construct
  source 1..75: mol_type = other DNA
ctgggctaccagttcgacctgctggctaacggcgaaaccgtattgcgggatgcatctggtgaaaaacgcatcaaa

SEQ ID NO: 885280 - DNA, 75 bp, synthetic construct
  source 1..75: mol_type = other DNA
atgtctgtgcattcaccagatgaatctgatcatgtttttagtcggatggaatatgaatattaccgacataacgat

SEQ ID NO: 885281 - DNA, 75 bp, synthetic construct
  source 1..75: mol_type = other DNA
catggtatagccgaggtcactatgacgcccgaaagaaacggttcgtatatggtgaaagcatccctggcgaatgga

SEQ ID NO: 885282 - DNA, 75 bp, synthetic construct
  source 1..75: mol_type = other DNA
ggccctagctatgtatacgaaatccgtgtgaagagttggtgggtgaacgccggcgatgctttcatgatatacagc

SEQ ID NO: 885283 - DNA, 75 bp, synthetic construct
  source 1..75: mol_type = other DNA
ctatgacgcccgaaagaaacggttcgtatatggtgaaagcatccctggcgaatggatcctcttatgagaaggatc

SEQ ID NO: 885284 - DNA, 75 bp, synthetic construct
  source 1..75: mol_type = other DNA
taccagcggtctgccgcccgatgatctggccgcgaagatgcgctacccgcaacgactgctgatcgcccatttctg

SEQ ID NO: 885285 - DNA, 75 bp, synthetic construct
  source 1..75: mol_type = other DNA
gacaggctataacacggtagcaaacaaggaagcaacccggaatgccgccgccctgttctctgttgactataaagc

SEQ ID NO: 885286 - DNA, 75 bp, synthetic construct
  source 1..75: mol_type = other DNA
ctggtaagcgcgccaaaagacaccaatgaaaatgtctttaaagccagtaaacaaaccattggtttcagtgatgta

SEQ ID NO: 885287 - DNA, 75 bp, synthetic construct
  source 1..75: mol_type = other DNA
ggtgataaatcaactgttactatgactggtgcattatccttaattaatacagacctgattatcaacaaaggagct

SEQ ID NO: 885288 - DNA, 75 bp, synthetic construct
  source 1..75: mol_type = other DNA
ggaatgttaagggcgttgccggagataatctgcataaaataggcagtggtactctggatgtaaaaatagcacagg

SEQ ID NO: 885289 - DNA, 75 bp, synthetic construct
  source 1..75: mol_type = other DNA
atggaatatacggtatgacaataaagacaaccttcataaaattggtgatggcactttagatgtcagaaaatccca

SEQ ID NO: 885290 - DNA, 75 bp, synthetic construct
  source 1..75: mol_type = other DNA
tcatcaccgccacaatcgttgataataatggctttccggtaaaaggtgtgactgtgagctttaccagcagaacaa

SEQ ID NO: 885291 - DNA, 75 bp, synthetic construct
  source 1..75: mol_type = other DNA
gtgagctctggttctcaggctaatcaacaggtgatttttatcggtgatcaaagtactgctgccctgaccctcagt

SEQ ID NO: 885292 - DNA, 75 bp, synthetic construct
  source 1..75: mol_type = other DNA
caacccaagcacagcacatgttgctagttttatcgctgatccgtcgactctcacggccaacaacagtgatatcag

SEQ ID NO: 885293 - DNA, 75 bp, synthetic construct
  source 1..75: mol_type = other DNA
acgatcaccagtctggaaatgcctgaaggtcaggtaataatcagagaacccatagcggttaaagcacacgtcgac

SEQ ID NO: 885294 - DNA, 75 bp, synthetic construct
  source 1..75: mol_type = other DNA
gtcgaaggtgtcaatgtaaacttcgtcttaaaaagcggctctgccacattgacgtcattaacagcggtgaccgat

SEQ ID NO: 885295 - DNA, 75 bp, synthetic construct
  source 1..75: mol_type = other DNA
gctccggcagcgtcattaccgccacagtcgttgataataatggctttccggtaaaaggtgtgactgtgagcttta

SEQ ID NO: 885296 - DNA, 75 bp, synthetic construct
  source 1..75: mol_type = other DNA
ccccgcagacacgcaactgagtctgaacgcgcgtaatactaatgagaacggtattgctgaagttacccttaaggg

SEQ ID NO: 885297 - DNA, 75 bp, synthetic construct
  source 1..75: mol_type = other DNA
gatcacaggtaatggcgtcgatagcgcaacgctaactgcaacggtcaaagatcagttcgacaatgaggtgaacaa

SEQ ID NO: 885298 - DNA, 75 bp, synthetic construct
  source 1..75: mol_type = other DNA
ttgagcgcggattcccattcaaccgccacactgacttttattgcgcatgatgcagcaggtaatcctgttatcggg

SEQ ID NO: 885299 - DNA, 75 bp, synthetic construct
  source 1..75: mol_type = other DNA
cgtgaccctcagtaataacggtataaatactaccaaccacgacggctatttatacgcaagcatgaccgctacaaa

SEQ ID NO: 885300 - DNA, 75 bp, synthetic construct
  source 1..75: mol_type = other DNA
cagactcgttgccaaaaataaagcatctgtggtgggagatatacactccactaaaagtgcatccatcatgtttgg

SEQ ID NO: 885301 - DNA, 75 bp, synthetic construct
  source 1..75: mol_type = other DNA
tcgtcttattcttgatgggggcgtggacacaacaaatgatataagcctgcgtaatacacaactgtccatgcaggg

SEQ ID NO: 885302 - DNA, 75 bp, synthetic construct
  source 1..75: mol_type = other DNA
cggcagcgtcattaccgccacagtcgttgataataatggctttccggtgaaaggtgtgactgtgaacttcaccag

SEQ ID NO: 885303 - DNA, 75 bp, synthetic construct
  source 1..75: mol_type = other DNA
ccgctgattggccgaacgggtgtggatgtgggtaaatccttctctggtaaggactggaaagtgacagcccgtgcc

SEQ ID NO: 885304 - DNA, 75 bp, synthetic construct
  source 1..75: mol_type = other DNA
ctttgaatttgcttcgcgtatggcgtgcaggaactggtagaattgagcagcgctggatggatgagcatattgttg

SEQ ID NO: 885305 - DNA, 75 bp, synthetic construct
  source 1..75: mol_type = other DNA
gcaatcgaccttagggtggtgtcgtgtcggtcgggcaaccatcgacaaacaagcgagactatcaaaaaacacggt

SEQ ID NO: 885306 - DNA, 75 bp, synthetic construct
  source 1..75: mol_type = other DNA
ctgccgcaccgccatgcttcagtccggaaactttcgggaaagcaagaattcgtcaaccaataattttcgggaaat

SEQ ID NO: 885307 - DNA, 75 bp, synthetic construct
  source 1..75: mol_type = other DNA
cattgaatataaaaatggaaggtgagttaaggagttataccattttgctgtatttccaaaaggtgaatgcagatg

SEQ ID NO: 885308 - DNA, 75 bp, synthetic construct
  source 1..75: mol_type = other DNA
gctctttttcgccgtcggtggtatctggtggctggtcgccttcatcggtaacatgccgccagcgctggggaaact

SEQ ID NO: 885309 - DNA, 75 bp, synthetic construct
  source 1..75: mol_type = other DNA
ttatgggtgctgatgggcattggctttatcgcctctatgctccatcttggttcaccaatgcgcgcttttaactcg

SEQ ID NO: 885310 - DNA, 75 bp, synthetic construct
  source 1..75: mol_type = other DNA
tgttggatcggcaataacgttattatattagatggtgtaacaatagggaatggcgttgttcttggggctggagct

SEQ ID NO: 885311 - DNA, 75 bp, synthetic construct
  source 1..75: mol_type = other DNA
tccaaattatcaaaacttctgatcttaataagaaaataagactgctcaaggagttggggggaatgctatgggcca

SEQ ID NO: 885312 - DNA, 75 bp, synthetic construct
  source 1..75: mol_type = other DNA
tttccgtcggctctgtaataattgcagtatctggcgccaggatggtgcacgataccagccacgaatacatgattt

SEQ ID NO: 885313 - DNA, 75 bp, synthetic construct
  source 1..75: mol_type = other DNA
ccgatattctatttgttaaattttattaaatgtaatttttgtgatgctgacattgttatagttcctttagaagcc

SEQ ID NO: 885314 - DNA, 75 bp, synthetic construct
  source 1..75: mol_type = other DNA
ggaaacggcgagcgcttgaagctgatgagcacgttcggcgactggagcaaatcaatgaccacatggtgaaagagg

SEQ ID NO: 885315 - DNA, 75 bp, synthetic construct
  source 1..75: mol_type = other DNA
gctcccacgggaaagaggccagcaggcactggaaacgttcgctgcggcctgggacagtcgctatcctcagataag

SEQ ID NO: 885316 - DNA, 75 bp, synthetic construct
  source 1..75: mol_type = other DNA
accattctcgccattggtgaatttgttgtaatttgcattcttggtttcgcaatagcctcccttgctccattaaaa

SEQ ID NO: 885317 - DNA, 75 bp, synthetic construct
  source 1..75: mol_type = other DNA
aaggattggacccaaggtactttgggtcgaatcgttgcgggtgcgatgatcctggtcggtgttgttggtggtatc

SEQ ID NO: 885318 - DNA, 75 bp, synthetic construct
  source 1..75: mol_type = other DNA
ccgatcatcggtacggataatgcggatatagtcgtcaagggcatgcagcgaaccaaagttgtgtctgtgacttta

SEQ ID NO: 885319 - DNA, 75 bp, synthetic construct
  source 1..75: mol_type = other DNA
gcgattatgctgccgccgaggcaatcaaagctattgagctcggtatgcatgtcatgctgtttagtgacaatgtga

SEQ ID NO: 885320 - DNA, 75 bp, synthetic construct
  source 1..75: mol_type = other DNA
ggcatatttcaggctggcgcaacaaatattgaaatagtgaagaaagatggctccaccctgaaactaccggaagta

SEQ ID NO: 885321 - DNA, 75 bp, synthetic construct
  source 1..75: mol_type = other DNA
gtgtggcagtgattatgtggcaggcatgcaaaatacagaagcagatgctgtaaaacaaagcgggtatacttataa

SEQ ID NO: 885322 - DNA, 75 bp, synthetic construct
  source 1..75: mol_type = other DNA
aacaccaatcttaaaacaggtgacggccttgtcatacttggtgcagagaaaaccttcaacaatatctacatggcc

SEQ ID NO: 885323 - DNA, 75 bp, synthetic construct
  source 1..75: mol_type = other DNA
ggggcggtttcaattattgtcgcaattgctatcgccaccattggaatcgaaaccaaaggtgtctccgttgaaagt

SEQ ID NO: 885324 - DNA, 75 bp, synthetic construct
  source 1..75: mol_type = other DNA
gcgattttaatctatggcctggtgatgatcttctttttatacatgtatgtttgcttcgcgtcggcggtttatatc

SEQ ID NO: 885325 - DNA, 75 bp, synthetic construct
  source 1..75: mol_type = other DNA
ctccggtaggaatatttattgcggcattaattattgatcattttcctcgtcggttatttggctccaccttactta

SEQ ID NO: 885326 - DNA, 75 bp, synthetic construct
  source 1..75: mol_type = other DNA
aaccattttggactctcccctgccccgctgtttgctgtcctggtgattacactggagttgggtgcatcccttatg

SEQ ID NO: 885327 - DNA, 75 bp, synthetic construct
  source 1..75: mol_type = other DNA
aaaccgtccgcccaatactcggggcggcaacattccggtggattggttatcttggtctatgtgcagcctacctgc

SEQ ID NO: 885328 - DNA, 75 bp, synthetic construct
  source 1..75: mol_type = other DNA
aaaccttttcaactaattcttttcgaattatcagaattctcactatattcaattgattctgaattgcgaaattta

SEQ ID NO: 885329 - DNA, 75 bp, synthetic construct
  source 1..75: mol_type = other DNA
aggcgaacgtggctcctcgaccgggaaaagcggcagcaggaaagagaaaattacggtccgctactacgacaaagt

SEQ ID NO: 885330 - DNA, 75 bp, synthetic construct
  source 1..75: mol_type = other DNA
aaattcacttaagcgtattattaatagtttcaattctgaactcatgggaggtgatgctgccaacttactgattta

SEQ ID NO: 885331 - DNA, 75 bp, synthetic construct
  source 1..75: mol_type = other DNA
actggataccatctatattgataaacccttacaaaaacataatcttatccagactatttctcgcgttaaccgtaa

SEQ ID NO: 885332 - DNA, 75 bp, synthetic construct
  source 1..75: mol_type = other DNA
aatatcgtaaagagctggataagcaattcaaaaacgctaaatcgaatttcaaaattgccattgttgttgatatgt

SEQ ID NO: 885333 - DNA, 75 bp, synthetic construct
  source 1..75: mol_type = other DNA
atgcatccggtgctacaggcggatgaaacgccactgcagatacagggcagcctgatacgcgtattggttctctat

SEQ ID NO: 885334 - DNA, 75 bp, synthetic construct
  source 1..75: mol_type = other DNA
gctatgggcggtgataccgtgcaggagttcattaagcacgtcagcaatgagtaccttataggctatttcgacccg

SEQ ID NO: 885335 - DNA, 75 bp, synthetic construct
  source 1..75: mol_type = other DNA
tctgtgccgaaccatcattatcagtacctcgaacgcatcattgatgcagtgcgcggtgggctcgcagaactggag

SEQ ID NO: 885336 - DNA, 75 bp, synthetic construct
  source 1..75: mol_type = other DNA
ctctgatgtcggtgcattacctcttaccggtggtacattatctggaggtttgacatcttctggcgagatcatttc

SEQ ID NO: 885337 - DNA, 75 bp, synthetic construct
  source 1..75: mol_type = other DNA
acaacggccacaacgacgagtgtctctggtgctctcactaatgcggagtttatctatgtatttaatggcacagat

SEQ ID NO: 885338 - DNA, 75 bp, synthetic construct
  source 1..75: mol_type = other DNA
ccgagcggttgcccgaatcctaagatacacataccgctatccacacgcgggcaatttctgcaaaaacagaaaatc

SEQ ID NO: 885339 - DNA, 75 bp, synthetic construct
  source 1..75: mol_type = other DNA
tttacactctgatccaagggctttttcatcctgtccgtttgctggacgtgttgaagaacttcgttttcttcccag

SEQ ID NO: 885340 - DNA, 75 bp, synthetic construct
  source 1..75: mol_type = other DNA
cggttaccggagagaaaagggggtaatgactccaacttattgatagtgttttatgttcagataatgcccgatgac

SEQ ID NO: 885341 - DNA, 75 bp, synthetic construct
  source 1..75: mol_type = other DNA
ccttacaatttattatacaaaagtaagtaacaatgttcagggcggaagagtgcatgctaaaggtatattcacgat

SEQ ID NO: 885342 - DNA, 75 bp, synthetic construct
  source 1..75: mol_type = other DNA
gggctatttcagcgcggcagaatgtgtgggggaatattttcgggcgatgccaggccggaacccctggtggttgac

SEQ ID NO: 885343 - DNA, 75 bp, synthetic construct
  source 1..75: mol_type = other DNA
gccaccggtaatattattccggccggttatcagattgccgctattgcaccgacgaaactgacctataaaaacggc

SEQ ID NO: 885344 - DNA, 75 bp, synthetic construct
  source 1..75: mol_type = other DNA
cgtgtttcatggtttgtcggcgtcatcgtcgcctttgcggcctacgccttattaaagaaacgtacaacagcagaa

SEQ ID NO: 885345 - DNA, 75 bp, synthetic construct
  source 1..75: mol_type = other DNA
gtgcagcagcaactgttacaggttaacgacaccgctcagggcgcagcaacggtgtggatggcctcacctgaactc

SEQ ID NO: 885346 - DNA, 75 bp, synthetic construct
  source 1..75: mol_type = other DNA
tacggcgtaccgtttgccatgatcctgcgtgcttcttacggcgtacgtggcgcactgtttcccggattattaaga

SEQ ID NO: 885347 - DNA, 75 bp, synthetic construct
  source 1..75: mol_type = other DNA
tcggcggtatggcgatttgggcgatttcgctggtcgggatcggtccaatctttgactacattccgagcggtattc

SEQ ID NO: 885348 - DNA, 75 bp, synthetic construct
  source 1..75: mol_type = other DNA
ggttaacgttggtattggttttggcggtggcaaagttttaaataaattcactgccattcttaacccgtgcatcta

SEQ ID NO: 885349 - DNA, 75 bp, synthetic construct
  source 1..75: mol_type = other DNA
ctggtgcgctgcattctgagctgcgcatcgagctgcatacccaatatgccattaacacctggagcgggcggccag

SEQ ID NO: 885350 - DNA, 75 bp, synthetic construct
  source 1..75: mol_type = other DNA
ctgctggcaaacgaagccgcgcagcggtttaaggatctgccgtccctgactcattcccatctcactatgcctttc

SEQ ID NO: 885351 - DNA, 75 bp, synthetic construct
  source 1..75: mol_type = other DNA
aaacgccactgcagatacagggcagcctgaaacgcgtattctgtgggctacgtcagcgcggcaggttgcgtgggg

SEQ ID NO: 885352 - DNA, 75 bp, synthetic construct
  source 1..75: mol_type = other DNA
tgtcagcagtaaaaacaccggatgaattactgcgccagttacgccgcgccgtcagattattaaacggttccgtca

SEQ ID NO: 885353 - DNA, 75 bp, synthetic construct
  source 1..75: mol_type = other DNA
cgcaagggcgtgaaatcaacgccacgctggcgatgcgtaataacgcgccgtggctggcgaatatcaaatatcttt

SEQ ID NO: 885354 - DNA, 75 bp, synthetic construct
  source 1..75: mol_type = other DNA
tggcgaagggttctattttgactccattcgcagcaccgcgtggattaaagacggcgttatgcacaccgacgacac

SEQ ID NO: 885355 - DNA, 75 bp, synthetic construct
  source 1..75: mol_type = other DNA
tgctgcacattcaggattatgaagtcgacgccatgctgggcctggggatggcaggtaaaggcaagggcggcaaag

SEQ ID NO: 885356 - DNA, 75 bp, synthetic construct
  source 1..75: mol_type = other DNA
catttaatggtggaatactgtggaaaaatgtagcgaaagcaataagggaatattcaccacaagatatattagtcc

SEQ ID NO: 885357 - DNA, 75 bp, synthetic construct
  source 1..75: mol_type = other DNA
ggtttcaaagcaggtaaaagttatcagttcttaccaaggtttttgattaaaaaattcagtatgcataagagattc

SEQ ID NO: 885358 - DNA, 75 bp, synthetic construct
  source 1..75: mol_type = other DNA
gtatgaggttcctgctggcacctcaggtaaagttaagtggagagtaataacagattacggtggaaaaagtaaatt

SEQ ID NO: 885359 - DNA, 75 bp, synthetic construct
  source 1..75: mol_type = other DNA
aatggaaaaatccgtaattaatggtctaattcgtcaagctgctgaaggtaaaccattcgaaggtgctcgtattga

SEQ ID NO: 885360 - DNA, 75 bp, synthetic construct
  source 1..75: mol_type = other DNA
atccagataaaagtcatatatgtggtaaagaaaacattccggaaatggggttgaaaacggtatttatgtcaaatt

SEQ ID NO: 885361 - DNA, 75 bp, synthetic construct
  source 1..75: mol_type = other DNA
tctaatacaattcttagtgaggatatgtatttcgccgcgaaaagcgtattgaacgggtataaagttgcatatatt

SEQ ID NO: 885362 - DNA, 75 bp, synthetic construct
  source 1..75: mol_type = other DNA
cactcaggatccgattgggctgaaagggggatggaatttttatcagtatccgttgaatccgatctcaaatataga

SEQ ID NO: 885363 - DNA, 75 bp, synthetic construct
  source 1..75: mol_type = other DNA
accactgcgaccaccggggcctgccgctggcgctcatcagcgaagacggaaatacggcgtggagcggggagtatg

SEQ ID NO: 885364 - DNA, 75 bp, synthetic construct
  source 1..75: mol_type = other DNA
accgctcatccgcatcgaaacagacaacggcgagcgggagaaaacgcagcggcggagcctggcggagaagctcca

SEQ ID NO: 885365 - DNA, 75 bp, synthetic construct
  source 1..75: mol_type = other DNA
attttgcaaaacataaacgatcttcagatatcccttgaaaatgactcgttacagttaggggcgtttttacaatta

SEQ ID NO: 885366 - DNA, 75 bp, synthetic construct
  source 1..75: mol_type = other DNA
gagcttattagagttcgagatcctctttttgatgatgatgatatcgatgcagtattgcgcgacttaatgtgtcaa

SEQ ID NO: 885367 - DNA, 75 bp, synthetic construct
  source 1..75: mol_type = other DNA
gcgaaaacgcagcgccgcagcctggcggatacccttcagcagtccggcggcgaagacggtggcagtgtggtgttc

SEQ ID NO: 885368 - DNA, 75 bp, synthetic construct
  source 1..75: mol_type = other DNA
ggttatcgccattgacggtgaatatatcaaccaggggataactcaatccgtttctgttgatggcggcgtctttaa

SEQ ID NO: 885369 - DNA, 75 bp, synthetic construct
  source 1..75: mol_type = other DNA
tgtcgaacagttgcgtgggcaactggggctgccagcaggaaaaaaaatcatcctttattcagggaatattggcga

SEQ ID NO: 885370 - DNA, 75 bp, synthetic construct
  source 1..75: mol_type = other DNA
tactgcatattcaggattatgaagttgatgccatgctggggctgaaactggcgggcaatggcagtggcggcacgc

SEQ ID NO: 885371 - DNA, 75 bp, synthetic construct
  source 1..75: mol_type = other DNA
agtagaaaccgaagaaaaagcggttgaagttgaagaaacagaagtgcgtgaaattgaatctgaatctaaagaaga

SEQ ID NO: 885372 - DNA, 75 bp, synthetic construct
  source 1..75: mol_type = other DNA
ctgctctcaatggccgactgccatctggtgattcaaaaacgcggcgcggcggatgcggtactgccgtccaaactg

SEQ ID NO: 885373 - DNA, 75 bp, synthetic construct
  source 1..75: mol_type = other DNA
aatgattattctggatggaaatacacgaaagaaaaacatccagaaatagtatacagatgtcctctttatgtacct

SEQ ID NO: 885374 - DNA, 75 bp, synthetic construct
  source 1..75: mol_type = other DNA
cattcagataccactaacgaacgttcatggcacttaggtctgccgctgatcctctccggactgtcgctggcgatc

SEQ ID NO: 885375 - DNA, 75 bp, synthetic construct
  source 1..75: mol_type = other DNA
caaatattatgtgaaaattgatcttaaagattttttcccctcgattcattatgatgatttcgaatatgcctttaa

SEQ ID NO: 885376 - DNA, 75 bp, synthetic construct
  source 1..75: mol_type = other DNA
atacattggcctcttttagtattctataaatattacattttcagaccgatcaatacgctcgaaaaagcatcaata

SEQ ID NO: 885377 - DNA, 75 bp, synthetic construct
  source 1..75: mol_type = other DNA
cagttcacgcgcttgggcatcaacgctgtcattcttgccgtccgtctgcgcaaggcaaccgggatgcccgaaaca

SEQ ID NO: 885378 - DNA, 75 bp, synthetic construct
  source 1..75: mol_type = other DNA
ttcagaccgcgtaggacgtgcaagcgtccgttttagtgctactggatttgcagatcagaagtatcaacaagtaaa

SEQ ID NO: 885379 - DNA, 75 bp, synthetic construct
  source 1..75: mol_type = other DNA
agggcgcactgatttttaccattgcatggattgctttaatggcattcctgacgtgggaaaacccgtttcgccact

SEQ ID NO: 885380 - DNA, 75 bp, synthetic construct
  source 1..75: mol_type = other DNA
cgttcggtatttgtcaggacagtgcgagctataacccgaccgacagtgccgtcagccggggatgggataatggca

SEQ ID NO: 885381 - DNA, 75 bp, synthetic construct
  source 1..75: mol_type = other DNA
ttccccgacagcagaaaacagttgtaagggagggggtatctgtgcctcttgttcttgagcaacagatacctgtgg

SEQ ID NO: 885382 - DNA, 75 bp, synthetic construct
  source 1..75: mol_type = other DNA
gctcaagcccggcggggatcaccgacaagctgattatcgacgctaccacgcctgtcgccccggacaaccgtggtc

SEQ ID NO: 885383 - DNA, 75 bp, synthetic construct
  source 1..75: mol_type = other DNA
cgattgacggaacaacgctgaaaaatgaaataaaaaatgatgccatcaaaattaaaggtggagatggtaagacgc

SEQ ID NO: 885384 - DNA, 75 bp, synthetic construct
  source 1..75: mol_type = other DNA
gcaacctgaagcggcacctcttcctgtgttgcgtttacaactccctttttcacccacgattaaccaacagccaga

SEQ ID NO: 885385 - DNA, 75 bp, synthetic construct
  source 1..75: mol_type = other DNA
gtggagaatgaagacggttctcacgttcctgtttcgcaaccaatcatcattaatgctgctggatatccggtatat

SEQ ID NO: 885386 - DNA, 75 bp, synthetic construct
  source 1..75: mol_type = other DNA
cccacgcctcagcggctggcagcagccgacccgcaggcattaaaagcgttaggcatgccgttgaaacgggcagag

SEQ ID NO: 885387 - DNA, 75 bp, synthetic construct
  source 1..75: mol_type = other DNA
gggactacaggtaatgaagtgaccgtcaccggtaaaggggatattgatgttactgttgatggaaatgggctgagt

SEQ ID NO: 885388 - DNA, 75 bp, synthetic construct
  source 1..75: mol_type = other DNA
gactattgaatacaggggctttgccggagataaggctgcatcagtagtatctgttggtgatgcgggtaaagagcg

SEQ ID NO: 885389 - DNA, 75 bp, synthetic construct
  source 1..75: mol_type = other DNA
tttgcatggtgacagattcggtgataaaaaaattccgaatgattactcgtcatctgaagcatcaggagacggaag

SEQ ID NO: 885390 - DNA, 75 bp, synthetic construct
  source 1..75: mol_type = other DNA
ttgctgaagccataaaccagtctggctggaaaattaaagcggataaagataccggtggtgttatcgagggaaatg

SEQ ID NO: 885391 - DNA, 75 bp, synthetic construct
  source 1..75: mol_type = other DNA
aaaagataacaatggtggtcttctgaaaaaagacctttcggatgaaatcgaaatcactggcaaaggcccaataaa

SEQ ID NO: 885392 - DNA, 75 bp, synthetic construct
  source 1..75: mol_type = other DNA
ttacgcctgatggaaatggtggtaacgggaagattacagtaagcaatggtgatgacgataagcttgttactgcga

SEQ ID NO: 885393 - DNA, 75 bp, synthetic construct
  source 1..75: mol_type = other DNA
tttcccaggcagctcaggctgtgcgtcgtatcactattcagcaagcaacacagcaggaccatgaaactggtgatt

SEQ ID NO: 885394 - DNA, 75 bp, synthetic construct
  source 1..75: mol_type = other DNA
atcgaaggtctcactgtgtacttcgccttaaaaagcggctctgccacattaacgtcattaacagcggtgacagat

SEQ ID NO: 885395 - DNA, 75 bp, synthetic construct
  source 1..75: mol_type = other DNA
gcgtaacgcccgaaggtgcaacgttaagtagccaaacggcgacaaccaacacttcaggtgaggcacaagtcgttc

SEQ ID NO: 885396 - DNA, 75 bp, synthetic construct
  source 1..75: mol_type = other DNA
gtcaggtaataatcagagaacccatagcggttaaagcacacgtcgacgaccagtttggcaatccagttgctgacc

SEQ ID NO: 885397 - DNA, 75 bp, synthetic construct
  source 1..75: mol_type = other DNA
gatgcggctaaagcccccgccgtggttaatatcatttctgtttcgtcatcccgaactcactcgtcaattaagatt

SEQ ID NO: 885398 - DNA, 75 bp, synthetic construct
  source 1..75: mol_type = other DNA
atgacgcccgaaagaaacggttcgtatatggtgaaagcatccctggcgaatggatcctcttatgagaaggatctg

SEQ ID NO: 885399 - DNA, 75 bp, synthetic construct
  source 1..75: mol_type = other DNA
gtgacagttagcgtgaacaattatggtgtcagtgatacgaaacaggtgactttgattgccgatgctggtaccgct

SEQ ID NO: 885400 - DNA, 75 bp, synthetic construct
  source 1..75: mol_type = other DNA
cagtgattcgcagccggtaacatttgtggcggacaaaacctcggctcaggttgtcctgcagatgtcaaaagatga

SEQ ID NO: 885401 - DNA, 75 bp, synthetic construct
  source 1..75: mol_type = other DNA
tggaaagaaaccgcagatggcgtctataaggcaacctataccgcctataccaaaggcagtgggcttactgcgaag

SEQ ID NO: 885402 - DNA, 75 bp, synthetic construct
  source 1..75: mol_type = other DNA
cgtgaaggatcgccgtgttttttatttcacggtttataatgatacagacaacgaatatatcatcacagcacgggt

SEQ ID NO: 885403 - DNA, 75 bp, synthetic construct
  source 1..75: mol_type = other DNA
agatattgattctgcgacgatcaccagtctggaaatgcctgaaggtcaggtaatagtcagagaacccatagcggt

SEQ ID NO: 885404 - DNA, 75 bp, synthetic construct
  source 1..75: mol_type = other DNA
acgcatacggttaccgcaacgctgggtaataacaataccagtgattcgcagccggtaacgtttgtggcggacaaa

SEQ ID NO: 885405 - DNA, 75 bp, synthetic construct
  source 1..75: mol_type = other DNA
cggcccaaagcgttgccgaacgtttcggtatttcggtggctgagttacgcaaactcaaccagtttcgtacgtttg

SEQ ID NO: 885406 - DNA, 75 bp, synthetic construct
  source 1..75: mol_type = other DNA
gggataaggctcccggcagcatcaaagttaacggggctgatggtaaggaggctgtgagtctgaatggtcaggatg

SEQ ID NO: 885407 - DNA, 75 bp, synthetic construct
  source 1..75: mol_type = other DNA
gtcattcatcatgagcggaccggtattctgctcccgccggataaccggcaggcctggctggaagccctgcgtgcg

SEQ ID NO: 885408 - DNA, 75 bp, synthetic construct
  source 1..75: mol_type = other DNA
cgtggttattgctgtgtagcattgtgagcacgcctgtaatggcggggagtaaatcggttgcgatggtcttgcgtg

SEQ ID NO: 885409 - DNA, 75 bp, synthetic construct
  source 1..75: mol_type = other DNA
gtgaaacattacatgcagcgaaccgctgttcagggtagtccgacgatgcttgccgctatcagtaaacagtgggtg

SEQ ID NO: 885410 - DNA, 75 bp, synthetic construct
  source 1..75: mol_type = other DNA
atgtcgcgcaatggcaacgcaaagaaggccatgggcaactgacagacgggattctggctttgcctgccatttcgg

SEQ ID NO: 885411 - DNA, 75 bp, synthetic construct
  source 1..75: mol_type = other DNA
cgctagaaacgaataatgctgttttttgtctggcgtatgaattgtctgtacaggcatcaacaatggcaaaggaaa

SEQ ID NO: 885412 - DNA, 75 bp, synthetic construct
  source 1..75: mol_type = other DNA
cgcgccgtcatatgtgggtgacattctggtgaaggcggattctgcaccgggaacgctgaataaatttctgatgga

SEQ ID NO: 885413 - DNA, 75 bp, synthetic construct
  source 1..75: mol_type = other DNA
tgattggcaaaatctggccgggatttttaactctcggtggtgattttaccctgttaggcctttctctaccgggct

SEQ ID NO: 885414 - DNA, 75 bp, synthetic construct
  source 1..75: mol_type = other DNA
ttgtcgcattcgctgcctacgcgttattaaaaaaacgtacagcagcagaaaaaacaggagaacaaaaagtcacag

SEQ ID NO: 885415 - DNA, 75 bp, synthetic construct
  source 1..75: mol_type = other DNA
tattccctttatggaaccgttatcgcgtgtttcatggttgtcggcgtcatcgtcgcctttgcggcctacgcctta

SEQ ID NO: 885416 - DNA, 75 bp, synthetic construct
  source 1..75: mol_type = other DNA
ttgtgcatatccgatttgacagcaactcccccgtgatggcagatgtgcaggaagaaggcaagcgcagctgtggaa

SEQ ID NO: 885417 - DNA, 75 bp, synthetic construct
  source 1..75: mol_type = other DNA
tattcctgttcacgatacaattgccagggttgtatcctgtatcagtcctgcaaaatttcacgagtgctttattaa

SEQ ID NO: 885418 - DNA, 75 bp, synthetic construct
  source 1..75: mol_type = other DNA
ggcggcaaagtattaaataaattcaccgctattcttaacccgtgcatctatatcgttttcggcggcatggcgatt

SEQ ID NO: 885419 - DNA, 75 bp, synthetic construct
  source 1..75: mol_type = other DNA
taggcgatatttacattgcgcaaaacaccgccttttggaagatcagtcctgatcggattgctcatccttaccaag

SEQ ID NO: 885420 - DNA, 75 bp, synthetic construct
  source 1..75: mol_type = other DNA
tttggagcaactgtagattctatttcacagtttatctttcaggaagatactgaaataagactttcagaaaaactc

SEQ ID NO: 885421 - DNA, 75 bp, synthetic construct
  source 1..75: mol_type = other DNA
atggtcaattcgcgtgccaggcgtagggagaaaaaattgccatacaaacaagatttcatcgctgcgctacttgcc

SEQ ID NO: 885422 - DNA, 75 bp, synthetic construct
  source 1..75: mol_type = other DNA
gaccaaatcagcgctggcggccctggacgaaaaagaatccgcgcgagcactggcaacgctggccgaagtgacggg

SEQ ID NO: 885423 - DNA, 75 bp, synthetic construct
  source 1..75: mol_type = other DNA
cgcgcgggcctgctgattgaaaccgaaaacaaagaaggacagtctttcgataaagacggcttttttgaacccacc

SEQ ID NO: 885424 - DNA, 75 bp, synthetic construct
  source 1..75: mol_type = other DNA
ccgacacatgggaagaaaaagatattacatctggacagtacaattcatttgtatatatcattcgatttgaaacgg

SEQ ID NO: 885425 - DNA, 75 bp, synthetic construct
  source 1..75: mol_type = other DNA
cagtgatgatttacaagtggcaattctagaatcagatggcactatacagtcctttaaaatacccttcactttgcc

SEQ ID NO: 885426 - DNA, 75 bp, synthetic construct
  source 1..75: mol_type = other DNA
aaaacatcaggaaagcaggcccactggctgaaatggctaagcaggttgagacgtcgattaaacgaaataggtttt

SEQ ID NO: 885427 - DNA, 75 bp, synthetic construct
  source 1..75: mol_type = other DNA
gaaaccggaagccaatcaaacttggggcgcacgcgttgcacgaggctataacgccggcggcgcgggggtcacact

SEQ ID NO: 885428 - DNA, 75 bp, synthetic construct
  source 1..75: mol_type = other DNA
ccacagagctatattcaaggccgtaacgccattgccggggccatcgtgatgacatcaaaagacccggattttgac

SEQ ID NO: 885429 - DNA, 75 bp, synthetic construct
  source 1..75: mol_type = other DNA
gaaaagacgggagggggaggcttcggaaaaggctggctcgatgaagtcaaggcaaaactgtccaggttgttctga

SEQ ID NO: 885430 - DNA, 75 bp, synthetic construct
  source 1..75: mol_type = other DNA
gaattaatcatgattttgaaatcatatcatatatctggccgtcctatatcactaagcattgattctcttaaagag

SEQ ID NO: 885431 - DNA, 75 bp, synthetic construct
  source 1..75: mol_type = other DNA
tagttcatctattcttattgacggatatatagatctaatcatcagttgtgttgttttgtttttacttatggtttt

SEQ ID NO: 885432 - DNA, 75 bp, synthetic construct
  source 1..75: mol_type = other DNA
ccatgtagacggtaagtctgagggcgaatttgttcaggctggtcgtatcgttgcgggggcgtatgactacactct

SEQ ID NO: 885433 - DNA, 75 bp, synthetic construct
  source 1..75: mol_type = other DNA
caacggtacgctgatgaccggaatgtcaggacagcaagctggcaatgtgttagtggtgaaggggaactaccacgg

SEQ ID NO: 885434 - DNA, 75 bp, synthetic construct
  source 1..75: mol_type = other DNA
tgaatggtatgttcagccgcaagcacaggttacctggatgggagtcaaagccgcaagcacaggttacctggatgg

SEQ ID NO: 885435 - DNA, 75 bp, synthetic construct
  source 1..75: mol_type = other DNA
acctggaagccttgctcggcatcgaatacgacgaaagcatgggcagatatgtagaggcaggaccttatgtcctgg

SEQ ID NO: 885436 - DNA, 75 bp, synthetic construct
  source 1..75: mol_type = other DNA
ataatgtgttgggtaatacccaggaactgcgtctggcggcagaaactgaaatggatatgaatggtcatagccaga

SEQ ID NO: 885437 - DNA, 75 bp, synthetic construct
  source 1..75: mol_type = other DNA
ttccgctaacattatcagtggtagtgaggggctgggcaatatcaatgcgctcagtggcacgacttacttaaccgg

SEQ ID NO: 885438 - DNA, 75 bp, synthetic construct
  source 1..75: mol_type = other DNA
atgagtacacattgtcgtgtatcttcggctacccacgggtcgcactggcacctcattaactggaggtactgtcat

SEQ ID NO: 885439 - DNA, 75 bp, synthetic construct
  source 1..75: mol_type = other DNA
gcaacgccagcggggaagaggacgaccgtcagcggatgagaagatagctcggatagtgccgctgctcgatgccgc

SEQ ID NO: 885440 - DNA, 75 bp, synthetic construct
  source 1..75: mol_type = other DNA
catttgacggttcggcagatatttctttaacagcttcggatgtcgaagcattgtcactggaggatgccaggaaga

SEQ ID NO: 885441 - DNA, 75 bp, synthetic construct
  source 1..75: mol_type = other DNA
actatgcattcagcggatatattgatgtcgcttctggtgctgtcgcggttatttctgaagacaagaacatcggcc

SEQ ID NO: 885442 - DNA, 75 bp, synthetic construct
  source 1..75: mol_type = other DNA
tcaatggcccgcttaactttttgctgaaaggtacggggttcctgaatgtctccaatgctggcagcgagttatatg

SEQ ID NO: 885443 - DNA, 75 bp, synthetic construct
  source 1..75: mol_type = other DNA
cgtggcccgcgcccgcaaccttagccagcttgcccgcgacgtgggatcactggagaaaggaagacgacaccaatg

SEQ ID NO: 885444 - DNA, 75 bp, synthetic construct
  source 1..75: mol_type = other DNA
tgccgtgaacctacagccaacatccgcgagatgagagatttcgcgaagcgctacgaagcgcattgggaaggttgc

SEQ ID NO: 885445 - DNA, 75 bp, synthetic construct
  source 1..75: mol_type = other DNA
tccggtgaaaggtgtgactgtgaacttcaccagcagaacaaactctgccgaaatgacgaatggcggccaagccgt

SEQ ID NO: 885446 - DNA, 75 bp, synthetic construct
  source 1..75: mol_type = other DNA
aacccgtgacattcagtgcagagccatcctcgcaaatgatcatcagccagaatacggtgtctactaatacgcagg

SEQ ID NO: 885447 - DNA, 75 bp, synthetic construct
  source 1..75: mol_type = other DNA
agcaaagaaagttcgctgaatctggacgcgtaccactggaaagaggacggtatcagcgataaaggcgtgatgctg

SEQ ID NO: 885448 - DNA, 75 bp, synthetic construct
  source 1..75: mol_type = other DNA
cgatagaatcaggagcgagaccagataccgttgaggccagtctggaaaatggtagctccacgcttagcacatcaa

SEQ ID NO: 885449 - DNA, 75 bp, synthetic construct
  source 1..75: mol_type = other DNA
tgttcaccaggcgggtctgagtaccacgatagaattcattagcgcgggagccagaccaatgaccggtacagtgtc

SEQ ID NO: 885450 - DNA, 75 bp, synthetic construct
  source 1..75: mol_type = other DNA
gtaccgcaaaactggctggttttaccgcatcatcaagctcattcaccgcgagcacaaccgagggcgcgaccctga

SEQ ID NO: 885451 - DNA, 75 bp, synthetic construct
  source 1..75: mol_type = other DNA
cttcacgataactcactgactaacagagcattgcttctttcagagaaggattcgctacttgacgaggcaaactca

SEQ ID NO: 885452 - DNA, 75 bp, synthetic construct
  source 1..75: mol_type = other DNA
tgattccccaatagcattagacaatgagaatttcagtagaatccaagaagagataaacactgagcttctcgaatt

SEQ ID NO: 885453 - DNA, 75 bp, synthetic construct
  source 1..75: mol_type = other DNA
ctaggatgtgatcctgttatggatgaggaatggaaatcaaatgatattaaagcgatattatatttcactataaat

SEQ ID NO: 885454 - DNA, 75 bp, synthetic construct
  source 1..75: mol_type = other DNA
caacagtgatttaagtaccttaaaggcaacggttgaggatggcagtggtaacctgatcgaaggtctcactgtgta

SEQ ID NO: 885455 - DNA, 75 bp, synthetic construct
  source 1..75: mol_type = other DNA
atgacgacacaatccagtcctgttattactgatatgaaagtcattccggtcgccgggtacgacagcatgttgctt

SEQ ID NO: 885456 - DNA, 75 bp, synthetic construct
  source 1..75: mol_type = other DNA
gaagtattcaagttaaaattgataatgaagatcttaaaatcagcaaagccaataactctgtcgcagaattgaaaa

SEQ ID NO: 885457 - DNA, 75 bp, synthetic construct
  source 1..75: mol_type = other DNA
tatttctcttgcacttagtgaaggcaagaaatatgcaattgtgctgaagggaagatacctccttggagaggatac

SEQ ID NO: 885458 - DNA, 75 bp, synthetic construct
  source 1..75: mol_type = other DNA
gaaggctcgaaatacatgcaggtctgggttcgttttggagagtccccggagttgccaggtgttaagcagaaacgc

SEQ ID NO: 885459 - DNA, 75 bp, synthetic construct
  source 1..75: mol_type = other DNA
gtaaacagcgccttgatacgatctatccagttggggattgcgaccatttaggtggcggcgggttataccgtcgtt

SEQ ID NO: 885460 - DNA, 75 bp, synthetic construct
  source 1..75: mol_type = other DNA
ttgagcgacttgcacgcaaaacaaaatatccgaccaatcactgcgcgaaattgttaaacaggctgataacgggct

SEQ ID NO: 885461 - DNA, 75 bp, synthetic construct
  source 1..75: mol_type = other DNA
gcgccacagcccgttgttacagctccgtcgacaacgcctgcaacctcacctgcaatggtgacaccgcaagccgcc

SEQ ID NO: 885462 - DNA, 75 bp, synthetic construct
  source 1..75: mol_type = other DNA
agtggcgatatcaaaaaagccgttgagcgcattcgtgaggtggaatacggcattatctgcgatatgtgccgcagc

SEQ ID NO: 885463 - DNA, 75 bp, synthetic construct
  source 1..75: mol_type = other DNA
cgaccacggtattccgcgaagcgcgcgtgttaagcaaccgctttagtatgttggcggatgccgcaccgaaggtag

SEQ ID NO: 885464 - DNA, 75 bp, synthetic construct
  source 1..75: mol_type = other DNA
gaaaccggggaatgtactgaccgttaacggcaactataccggaaacaatggcctgatgacgttcaacgcgacgct

SEQ ID NO: 885465 - DNA, 75 bp, synthetic construct
  source 1..75: mol_type = other DNA
accattggtgttgcgggcgtcggaaacctcaatattagcgatggcggtaagttcgtatcgcaaaatattactttt

SEQ ID NO: 885466 - DNA, 75 bp, synthetic construct
  source 1..75: mol_type = other DNA
gcctgtgggggctggcactcagcctgcccgcagacaccggctacccggacccgcgcggggaactggacccggaag

SEQ ID NO: 885467 - DNA, 75 bp, synthetic construct
  source 1..75: mol_type = other DNA
acagatatactaaagctggtgtgtatactccccataatgatattggttacttggtatatgatgtcgtatatggat

SEQ ID NO: 885468 - DNA, 75 bp, synthetic construct
  source 1..75: mol_type = other DNA
gccgcccccggcctgctgtatgcgggacagtggcaggatacggaatccgggctgtgctataaccggttccggtat

SEQ ID NO: 885469 - DNA, 75 bp, synthetic construct
  source 1..75: mol_type = other DNA
ggtggaatcacctggcgttatgatgacgatggcaaaatccatattgtcaaagaggcgggtacagttgctgacgga

SEQ ID NO: 885470 - DNA, 75 bp, synthetic construct
  source 1..75: mol_type = other DNA
caccggggcgctgacagggaacgccgacaccgcgacgaaattaaaaacagccagaaacattaatggcgtcaggtt

SEQ ID NO: 885471 - DNA, 75 bp, synthetic construct
  source 1..75: mol_type = other DNA
tacaaccggaaccggtactacgatccgttgcaggggcggtatatcactcaggacccgatagggctggagggggat

SEQ ID NO: 885472 - DNA, 75 bp, synthetic construct
  source 1..75: mol_type = other DNA
ttgatggtactgcgaatattaatttacctggtgttaatgccactggcaatcagaatacaacaggtaatgcagcga

SEQ ID NO: 885473 - DNA, 75 bp, synthetic construct
  source 1..75: mol_type = other DNA
attgcagaaaaaccagaatggcgcggatattcctggaaaagataccttcactaaaaatattggtgcatgtcgcgc

SEQ ID NO: 885474 - DNA, 75 bp, synthetic construct
  source 1..75: mol_type = other DNA
ggtggcggaactactaatgcacaatttacttatataaaccacggtggagattatgcgccaggctggcggcgtgac

SEQ ID NO: 885475 - DNA, 75 bp, synthetic construct
  source 1..75: mol_type = other DNA
cagggaactggacaacggcacaattgattgaatggctggattctcaaggggcattcaatcacccatactggatgt

SEQ ID NO: 885476 - DNA, 75 bp, synthetic construct
  source 1..75: mol_type = other DNA
gattctgggacatgcgagcattcagcagacgatggcctatgcgcaccttgcgcctgactatctgcaaaatgccgt

SEQ ID NO: 885477 - DNA, 75 bp, synthetic construct
  source 1..75: mol_type = other DNA
ggcagaccgcgatttactccgccggtgagcatctggagctctgctgtggtaaggcaaggctggtgctgacgaagg

SEQ ID NO: 885478 - DNA, 75 bp, synthetic construct
  source 1..75: mol_type = other DNA
cggaaattaccgtcagccatgtgctcattcagatgctcaccatgccacgcagtgacctgcgggttattacccgcc

SEQ ID NO: 885479 - DNA, 75 bp, synthetic construct
  source 1..75: mol_type = other DNA
gggctgaaggggggatggaatttttatcagtatccgttgaatccggtcataaatgtagatccgcaaggtttggtt

SEQ ID NO: 885480 - DNA, 75 bp, synthetic construct
  source 1..75: mol_type = other DNA
gtggctgcttccctgcgttcctggtatgagaactggaataaacaaagcgcactgcccgagccgccgcagtttgtg

SEQ ID NO: 885481 - DNA, 75 bp, synthetic construct
  source 1..75: mol_type = other DNA
gcctgcaaggtactgaatgacgtgccggagggatttagtcgcctacaagtgcagatccgttcccccgaacatgaa

SEQ ID NO: 885482 - DNA, 75 bp, synthetic construct
  source 1..75: mol_type = other DNA
ggatagcgaaaccacgaatcgtacctatgcacgttttgacggtagccaggaaaacatctccggactggtgatcac

SEQ ID NO: 885483 - DNA, 75 bp, synthetic construct
  source 1..75: mol_type = other DNA
gcaacgatggttatgtcagaacttgaaaaagcagtattaaagcctcggtatacaccgtatctggggcggaggagt

SEQ ID NO: 885484 - DNA, 75 bp, synthetic construct
  source 1..75: mol_type = other DNA
attggtcgacgaatgtgccttacccgcgaaggaaaaaagttgctgccgcacatctatgaacttacccgagtgatg

SEQ ID NO: 885485 - DNA, 75 bp, synthetic construct
  source 1..75: mol_type = other DNA
gttgaattctttgattaccagtgcgtctactgtgcccgcctggcgccggaactggagaaagtgataaaagctaac

SEQ ID NO: 885486 - DNA, 75 bp, synthetic construct
  source 1..75: mol_type = other DNA
ccacgctggagtcgttgaagaacgaacagtgggtgttgccacaaaccaatatggggtactacagcgagctactta

SEQ ID NO: 885487 - DNA, 75 bp, synthetic construct
  source 1..75: mol_type = other DNA
cattttccggggtaggaagtatggcatcaccacaacaatttagtattaaactggaaaaatgtccggcaacctata

SEQ ID NO: 885488 - DNA, 75 bp, synthetic construct
  source 1..75: mol_type = other DNA
caatcaccggttccgctgtatgcgtccggcatgagcgtttcattctatcgccttggctccaacatgcgcgttccg

SEQ ID NO: 885489 - DNA, 75 bp, synthetic construct
  source 1..75: mol_type = other DNA
ccgtcgttgtgctgaccgtgccgacagcgacaaccttcacctatgcgcctgccagcgcgccgggcggttccgcaa

SEQ ID NO: 885490 - DNA, 75 bp, synthetic construct
  source 1..75: mol_type = other DNA
tgggtaatgcgctggcggtgctggtgattgccaagtgggaacacaaatttgaccgcaaaaaggcgctggcttatg

SEQ ID NO: 885491 - DNA, 75 bp, synthetic construct
  source 1..75: mol_type = other DNA
gaccttttggacatccggatggtgatattcgtgatttagcatttcttgatgctcatcaggctgtctacgttcagc

SEQ ID NO: 885492 - DNA, 75 bp, synthetic construct
  source 1..75: mol_type = other DNA
gtggcgtcagcgatcgccagcgcgccgtggtggcaaagttaatcagcaccggcggcctgaaccgcgattattaca

SEQ ID NO: 885493 - DNA, 75 bp, synthetic construct
  source 1..75: mol_type = other DNA
cattgccaccactgccgtgacctactcgaacggcgtagccaccgccaccaccgcctccgcgcatgggctgactgc

SEQ ID NO: 885494 - DNA, 75 bp, synthetic construct
  source 1..75: mol_type = other DNA
gtcccaccggacgatggcggcgacaccccggtaccaccggacgatggcggtgacaccccggtaccaccggacgat

SEQ ID NO: 885495 - DNA, 75 bp, synthetic construct
  source 1..75: mol_type = other DNA
gagtggcaagtcgatgcaggtcgcctagtcaagttaactggtaaaaatacgaaatcagcctcttttggttttttg

SEQ ID NO: 885496 - DNA, 75 bp, synthetic construct
  source 1..75: mol_type = other DNA
cccatcgttggtgatgtgctcgttgagttagcggaaattacatttgaagcgcgtttaacagcggaagaaattcac

SEQ ID NO: 885497 - DNA, 75 bp, synthetic construct
  source 1..75: mol_type = other DNA
acttggtctggggatttacgttttagcggaagcgttaatatttgctcccttgttgagactggctgtatatattga

SEQ ID NO: 885498 - DNA, 75 bp, synthetic construct
  source 1..75: mol_type = other DNA
ctgcgccaagacataaagaaaggactcgtcggtgggcaaatagcagagcagattcaagcgattccggttgatgtt

SEQ ID NO: 885499 - DNA, 75 bp, synthetic construct
  source 1..75: mol_type = other DNA
ttacgccaagacatcaagaaagggctcgtgggcggacaaataacggatcaaattcaagccgttccggttgacgtt

SEQ ID NO: 885500 - DNA, 75 bp, synthetic construct
  source 1..75: mol_type = other DNA
tgtcgggttttatttcagtacaaatacgccaaaatgaagcgtcccgcgagcacgggagggataaatcacaaaagg

SEQ ID NO: 885501 - DNA, 75 bp, synthetic construct
  source 1..75: mol_type = other DNA
aacggcagcaacaccaccattactctgaaattcaagcaggagccggggatcacctatgaaaccctgaccaccaat

SEQ ID NO: 885502 - DNA, 75 bp, synthetic construct
  source 1..75: mol_type = other DNA
atcgaaagtgtcgccaccgactttggcactaccgctgaagagtacaaggcggcaaacctttacttccagcagtcg

SEQ ID NO: 885503 - DNA, 75 bp, synthetic construct
  source 1..75: mol_type = other DNA
tgcagaactacgtccagaacaacctctggaacctgctttacacctccaccaccaaaattccacagactgaagccg

SEQ ID NO: 885504 - DNA, 75 bp, synthetic construct
  source 1..75: mol_type = other DNA
atgctgctcaggatcttgatgaatggaggtcagtttggctggctggtggtacttggcgctttcattgtggtcagc

SEQ ID NO: 885505 - DNA, 75 bp, synthetic construct
  source 1..75: mol_type = other DNA
ttgatgagcggcatggcctggactggctgcagaactacgttcagaccaatctctataacctgctttacacctcgg

SEQ ID NO: 885506 - DNA, 75 bp, synthetic construct
  source 1..75: mol_type = other DNA
agaactacgttcagaccaacctctataacctgctttacaccagcaccaccaaaattccgcagactgatgccggtg

SEQ ID NO: 885507 - DNA, 75 bp, synthetic construct
  source 1..75: mol_type = other DNA
aatcatactgttccggcttcagagacctcaacgccacgtggttccagatctgctgtcaggtatgcagccttaccc

SEQ ID NO: 885508 - DNA, 75 bp, synthetic construct
  source 1..75: mol_type = other DNA
ggcccggtggaaggcattcgcgccaccggtgccaacaagctcgaagagatcctctacggcgtgctgccacaggtg

SEQ ID NO: 885509 - DNA, 75 bp, synthetic construct
  source 1..75: mol_type = other DNA
cgaagcggtggaagcgattgaacccggcccggtggaaggcattcgcgccaccggtgccaacaagctcgaagagat

SEQ ID NO: 885510 - DNA, 75 bp, synthetic construct
  source 1..75: mol_type = other DNA
atgatcccaaataacatacagtttattatgagcaatgacttaagctcgaaaaaaccacgtattgcaaacattatt

SEQ ID NO: 885511 - DNA, 75 bp, synthetic construct
  source 1..75: mol_type = other DNA
agatgtcaggtaaccagcagcagtaccgcatcggcctggtagagaaaatcggcgctgagcgcgtcgaggcgctcg

SEQ ID NO: 885512 - DNA, 75 bp, synthetic construct
  source 1..75: mol_type = other DNA
atggttaatgatgcttacgcccctgagctgttgcgatccctcttcctgtatgacccggtgacaggtcgcctgcac

SEQ ID NO: 885513 - DNA, 75 bp, synthetic construct
  source 1..75: mol_type = other DNA
tacttcagtatgattattcgacaccgacaaatccagtcccggaaccgggtggggtagcgctaatggcgcaaggag

SEQ ID NO: 885514 - DNA, 75 bp, synthetic construct
  source 1..75: mol_type = other DNA
aggtaaatcgatgaggaatattttagattctataccagtggatttaaaaaaaaatattaaaacaatggttgccta

SEQ ID NO: 885515 - DNA, 75 bp, synthetic construct
  source 1..75: mol_type = other DNA
cacatcagcaccagtcaccactacacgattccagcgaagcgaaaccggggatggactcactggcacctgaagacg

SEQ ID NO: 885516 - DNA, 75 bp, synthetic construct
  source 1..75: mol_type = other DNA
tttcaccaagtgaaggcgtgacccccagtaataacggtatatatactaccaactactacggcaatttttacgcaa

SEQ ID NO: 885517 - DNA, 75 bp, synthetic construct
  source 1..75: mol_type = other DNA
aggaatattaagtgagtctgatattatagaaaacttcatagaaattttgcttcgtaaacattttatggatactcc

SEQ ID NO: 885518 - DNA, 75 bp, synthetic construct
  source 1..75: mol_type = other DNA
atgattcagttgcgcgtgtattagctgaacctaacctttccgttctgtccggcgaaacagccgaatttctggtcg

SEQ ID NO: 885519 - DNA, 75 bp, synthetic construct
  source 1..75: mol_type = other DNA
atatgagaaattaatcatgttaaatatggcgacaaaagaagaaaggcaatctgcaggaattcattccagacataa

SEQ ID NO: 885520 - DNA, 75 bp, synthetic construct
  source 1..75: mol_type = other DNA
tgcgaagggatatagccgtcattcttgttctggtaaatgggaggcttacattcgcgttaatggtgtgcgccatca

SEQ ID NO: 885521 - DNA, 75 bp, synthetic construct
  source 1..75: mol_type = other DNA
taagcaccatcaaatcaattaacgataattgtcagttaattattgttactcatagtcctgcaatattaatgaaag

SEQ ID NO: 885522 - DNA, 75 bp, synthetic construct
  source 1..75: mol_type = other DNA
gcattttttagattggtcattgaatattccataagaatcatattttctagtgatataagtctaagggcaaggatt

SEQ ID NO: 885523 - DNA, 75 bp, synthetic construct
  source 1..75: mol_type = other DNA
tttcatttggtttgatttttactccattttttattcctcttggcttaaatataattatgcgagatgtgtcgaatg

SEQ ID NO: 885524 - DNA, 75 bp, synthetic construct
  source 1..75: mol_type = other DNA
acttattttagtgcggcacataatcaactagagtttgtgcaattagaatcttgcgaatgtctgcaatacctgaat

SEQ ID NO: 885525 - DNA, 75 bp, synthetic construct
  source 1..75: mol_type = other DNA
caaccaatgacattgatcaactaatatcatcaaaacatctttggcatgtattagttaacggcatcaacaatgatc

SEQ ID NO: 885526 - DNA, 75 bp, synthetic construct
  source 1..75: mol_type = other DNA
acgagggagatgttggtagtgaaaggttattagaagaaatatttattgaacatcacataacctccatcattcatt

SEQ ID NO: 885527 - DNA, 75 bp, synthetic construct
  source 1..75: mol_type = other DNA
ctatgcaaaagataaccgggttaaaatattaggattccatggtaaatcgcatcatgaaattgaaatattcccttt

SEQ ID NO: 885528 - DNA, 75 bp, synthetic construct
  source 1..75: mol_type = other DNA
tttgggatctcaaagaaagtaaaaattatgatggattacttttttcggtgcctaatgtttgtaaatcaactaaaa

SEQ ID NO: 885529 - DNA, 75 bp, synthetic construct
  source 1..75: mol_type = other DNA
gtttttttatatttatcttgcttgttattactagcaagtatatgattttttcaatattacccattggcaatgtaa

SEQ ID NO: 885530 - DNA, 75 bp, synthetic construct
  source 1..75: mol_type = other DNA
tgtggcggtttgtgcaacgtcaggctatggcaatggattttagctggcaggtcgcggcgaagtcgtaccgtgagc

SEQ ID NO: 885531 - DNA, 75 bp, synthetic construct
  source 1..75: mol_type = other DNA
caaaatcaccactcccaacaggtgattttaaaacctctcaaaaaagacttaccgcagagataaaagaagtcgaag

SEQ ID NO: 885532 - DNA, 75 bp, synthetic construct
  source 1..75: mol_type = other DNA
gatttggtggtctttttatcggttacatttttgtttacttcccttatatatcattagtatatgcatattgtcaaa

SEQ ID NO: 885533 - DNA, 75 bp, synthetic construct
  source 1..75: mol_type = other DNA
gattctttcatgatatacagccttgctgaaaatttttgcagtagcaatggctacatgcttccccgtgcaagcctt

SEQ ID NO: 885534 - DNA, 75 bp, synthetic construct
  source 1..75: mol_type = other DNA
agcgaggatctcggcgcaggtacgcatgttgaggtgattgcgatagaagggataacgctgattatccgtgcggtc

SEQ ID NO: 885535 - DNA, 75 bp, synthetic construct
  source 1..75: mol_type = other DNA
actggcggcaacgccaaaagcagttaaggccgcgtatgacctggctaacgggaaatacaccgcacagaatgcaac

SEQ ID NO: 885536 - DNA, 75 bp, synthetic construct
  source 1..75: mol_type = other DNA
gttatgtgatctatcaaagcaacgtgtcagcgggtgcctttgaaattaacgatctctacccctcttccaacagcg

SEQ ID NO: 885537 - DNA, 75 bp, synthetic construct
  source 1..75: mol_type = other DNA
ccttctcctcaattaaattccttattagatgaccagtatgacccgtttggaagttatacaatggtttgcaacgca

SEQ ID NO: 885538 - DNA, 75 bp, synthetic construct
  source 1..75: mol_type = other DNA
ccagcagtttctctcccttgaatttgcgcaggtgctggacaaaatggcctacctgacaatatggcagggtgatga

SEQ ID NO: 885539 - DNA, 75 bp, synthetic construct
  source 1..75: mol_type = other DNA
aatgggctaaagggacaataaaaatcgcacttgatttcggcccggaaagttccataaaccgccaaagctacacgg

SEQ ID NO: 885540 - DNA, 75 bp, synthetic construct
  source 1..75: mol_type = other DNA
gaaagtcgaaaacgtccagcaggcgtggcagcaatggatcaacaaactgccgcccgcacgtcgtgaggatgaaga

SEQ ID NO: 885541 - DNA, 75 bp, synthetic construct
  source 1..75: mol_type = other DNA
agaaccagcaagaaacggaacagaacgaccagaaagcggaacaaaacagcccaaatacgcaacaaaacgagccag

SEQ ID NO: 885542 - DNA, 75 bp, synthetic construct
  source 1..75: mol_type = other DNA
agatgttggcaagacacttaaatcacatgccgaagccatagagaaacacggttatctgttctgggatggcaatcc

SEQ ID NO: 885543 - DNA, 75 bp, synthetic construct
  source 1..75: mol_type = other DNA
caacctttacaccacgtggcggctcacgccggataaacgccccggaaaaaaagaatttgcgcattaccgattcag

SEQ ID NO: 885544 - DNA, 75 bp, synthetic construct
  source 1..75: mol_type = other DNA
atagcaaaaatattatctgatgccagacgcttacccaatgaatggaaaattttgggcggaaacgcaaaagcaaaa

SEQ ID NO: 885545 - DNA, 75 bp, synthetic construct
  source 1..75: mol_type = other DNA
tcggtttcgctatctgccgcaacgtgattatctgcgccatccggctgcggcagcccttttgcttacccaacttct

SEQ ID NO: 885546 - DNA, 75 bp, synthetic construct
  source 1..75: mol_type = other DNA
atgtttaatgtaattactcacccggccgcactgaatgagttgattgaattaccagataatctgcgtggtcgcatg

SEQ ID NO: 885547 - DNA, 75 bp, synthetic construct
  source 1..75: mol_type = other DNA
ggatggaatcctccggagactacccgtaaaccgatccctaaagtaaccagagccaggctcaccatggaagactgg

SEQ ID NO: 885548 - DNA, 75 bp, synthetic construct
  source 1..75: mol_type = other DNA
ctttcatggctggaccctgcgcgtgttcttgcagtggatttgttccctgaccagcttaccgtgacccgttcacag

SEQ ID NO: 885549 - DNA, 75 bp, synthetic construct
  source 1..75: mol_type = other DNA
ggtatgttgatccgttagggttggctgtatgtcctaaattgtatgaaatatacaagggattaagagcacaaggat

SEQ ID NO: 885550 - DNA, 75 bp, synthetic construct
  source 1..75: mol_type = other DNA
cctgctaaagatcattttgatgcagcggtaaaatggggtgaggagtggttaaagagtaatggatttggtggatgg

SEQ ID NO: 885551 - DNA, 75 bp, synthetic construct
  source 1..75: mol_type = other DNA
accgcgatgataaactgtacagcgtacggcacctggtgtttaacagctttgagctgataagccagcagttcagcc

SEQ ID NO: 885552 - DNA, 75 bp, synthetic construct
  source 1..75: mol_type = other DNA
ttttatgtattttaaaatgtgcatatattatatactttgttttgggtttgttaggtgttttttgaaaaaagaaaa

SEQ ID NO: 885553 - DNA, 75 bp, synthetic construct
  source 1..75: mol_type = other DNA
tgaaaaataataatattgtaggaatgtttgttttaattgtttcttctacaatcatgatatatgacccatggtttt

SEQ ID NO: 885554 - DNA, 75 bp, synthetic construct
  source 1..75: mol_type = other DNA
tgcttgacgatcccacgccgctttttggagatgacgttccctttaataaccctcatctcttgctcagtgaaggag

SEQ ID NO: 885555 - DNA, 75 bp, synthetic construct
  source 1..75: mol_type = other DNA
ggccggataaccgcatcgcagaggatgcgcactatgtttaccactatgatgaatacggcagactgacggagaaga

SEQ ID NO: 885556 - DNA, 75 bp, synthetic construct
  source 1..75: mol_type = other DNA
atatcaattgaatccgatatcagacatcgaccccctgggtttatctatgtgggaggatgcaaaatcgggggcatg

SEQ ID NO: 885557 - DNA, 75 bp, synthetic construct
  source 1..75: mol_type = other DNA
aaaaattggcgagagaacttattatgttcaacgctatttttattccactacgttttatgtcagagacaaaggggt

SEQ ID NO: 885558 - DNA, 75 bp, synthetic construct
  source 1..75: mol_type = other DNA
ttctgttgacggttttatttgtcatttctttatttatctcagcgcaagggaatacacaggaaccagaaagagggg

SEQ ID NO: 885559 - DNA, 75 bp, synthetic construct
  source 1..75: mol_type = other DNA
ggaaaaagctcagcaataaaacttgccgatgcgctaggcgtaagtcttgagtgggttctaggtcaggacgtggat

SEQ ID NO: 885560 - DNA, 75 bp, synthetic construct
  source 1..75: mol_type = other DNA
aaatttataatggcggcacggtgacgctgaaaaatacatctgcagtcgcgcatcagggggctggagttgtgctgg

SEQ ID NO: 885561 - DNA, 75 bp, synthetic construct
  source 1..75: mol_type = other DNA
aaaagctgcattggagcagtgggctgaactgctggttacgctggaaagtggtgaagattacaacgtcgtccccat

SEQ ID NO: 885562 - DNA, 75 bp, synthetic construct
  source 1..75: mol_type = other DNA
gctgggtgaacatcagtatgtttctgccgtacataccgatactgataacctgcatgttcacgttgcggtcaaccg

SEQ ID NO: 885563 - DNA, 75 bp, synthetic construct
  source 1..75: mol_type = other DNA
tgaaggaaaagacacggaagacatttttgaccgggtcatcattgcaacaggtgaactctggcaaccccgccggcc

SEQ ID NO: 885564 - DNA, 75 bp, synthetic construct
  source 1..75: mol_type = other DNA
catcgttaacggggttcaccgctgataaccccgaatatcatttatccaatggcatggaatcgaaatcagtcgata

SEQ ID NO: 885565 - DNA, 75 bp, synthetic construct
  source 1..75: mol_type = other DNA
tgataaagcaaatgcgccagcagggcgcgtacattgtcgatattgcgactcagattggttgctctgaacgaaccg

SEQ ID NO: 885566 - DNA, 75 bp, synthetic construct
  source 1..75: mol_type = other DNA
cccgcagcgagaaacaacaccattctaccctcgttcgccttatgctgttgcgaagatgtatgcatactggattac

SEQ ID NO: 885567 - DNA, 75 bp, synthetic construct
  source 1..75: mol_type = other DNA
attgcgtcgaataaaaatataaatgatgtcagcaaggtatactggagtatattatgctgtaagcttattctttta

SEQ ID NO: 885568 - DNA, 75 bp, synthetic construct
  source 1..75: mol_type = other DNA
gaataatatggcgatatattggaatagtagagcatctttattttgttcaactgaattaaactcgaaatcacaatc

SEQ ID NO: 885569 - DNA, 75 bp, synthetic construct
  source 1..75: mol_type = other DNA
tcttgtggcagcaatggctccactttttaatgagtacggttatcgtgattcttgcgatgacccggcatacgatgt

SEQ ID NO: 885570 - DNA, 75 bp, synthetic construct
  source 1..75: mol_type = other DNA
attttaacggcgacgctaatttgaatagtgacggaactttctatttcagacgttgctggacgggagcaaaacagt

SEQ ID NO: 885571 - DNA, 75 bp, synthetic construct
  source 1..75: mol_type = other DNA
cctggcagcgttgtcatgagttgtttgcacaacagggactgatgctacagaaacaacatcacgggcttgttgtcg

SEQ ID NO: 885572 - DNA, 75 bp, synthetic construct
  source 1..75: mol_type = other DNA
cttgatattgataaagaacatgatcttgtagcattagcgcaatatcactgcaatgcaaatggaaataatcgtagc

SEQ ID NO: 885573 - DNA, 75 bp, synthetic construct
  source 1..75: mol_type = other DNA
acaaacagcgcctgccgggcagtttcctgtaagagaatgtatgctttctctgcctgatcttcctggaggggcaga

SEQ ID NO: 885574 - DNA, 75 bp, synthetic construct
  source 1..75: mol_type = other DNA
atgggaaatattccatttttttgtaagacatgggctgctgcacggtatgttgttgcccgtgttctgcgtggactg

SEQ ID NO: 885575 - DNA, 75 bp, synthetic construct
  source 1..75: mol_type = other DNA
atatttagttctcgttcctttgttctttattagtgatgttttatcatcatggctttttaaacgttttgagaaaaa

SEQ ID NO: 885576 - DNA, 75 bp, synthetic construct
  source 1..75: mol_type = other DNA
ccgacattattgttttattcgcgctacgcaaaaaggaccaaatgaatcagaagcagattatcaatataattgtag

SEQ ID NO: 885577 - DNA, 75 bp, synthetic construct
  source 1..75: mol_type = other DNA
agagagttatgggaagaagaagttaataggctacatagtttaccaaataaagatgatgaattttgtaaattattc

SEQ ID NO: 885578 - DNA, 75 bp, synthetic construct
  source 1..75: mol_type = other DNA
aagataacaacgactggtatctgcgatcacaagaagtcaatccgacgccgccgcctgatccagacccgactccag

SEQ ID NO: 885579 - DNA, 75 bp, synthetic construct
  source 1..75: mol_type = other DNA
catattatacaagaagcattaaaaccatttttagaaaaaaatctgataagtataaaatatgacttaattataaaa

SEQ ID NO: 885580 - DNA, 75 bp, synthetic construct
  source 1..75: mol_type = other DNA
aagcatttatcttataattacttggacgcaaataaagaattttacaatcaagactatcgtaaatggtgccaatgg

SEQ ID NO: 885581 - DNA, 75 bp, synthetic construct
  source 1..75: mol_type = other DNA
ggtcttgccccgatgaaactgaaagagggcttgaagcgctccggtaagttcgtccagaagtggaaccctgacagt

SEQ ID NO: 885582 - DNA, 75 bp, synthetic construct
  source 1..75: mol_type = other DNA
tcaccagcctggaacatcagcaatccgcccgcgcgttaaagcaaaactatgccgcctatatggagatcaaacctc

SEQ ID NO: 885583 - DNA, 75 bp, synthetic construct
  source 1..75: mol_type = other DNA
tttaatgccctgcaggaatggcttatccgccagggaaatcctgtgtattccgggcttgaaacggcctttaacgct

SEQ ID NO: 885584 - DNA, 75 bp, synthetic construct
  source 1..75: mol_type = other DNA
gcgataacatgctacgcctgtgggatgacctgaatgaccgttacgcgccgccggaagttgtgcgtgagctggcgc

SEQ ID NO: 885585 - DNA, 75 bp, synthetic construct
  source 1..75: mol_type = other DNA
gttgatgctgttgcagctattgcagaggtgagaggctggaacgcctgccgtgcagccatgcttaagggagataaa

SEQ ID NO: 885586 - DNA, 75 bp, synthetic construct
  source 1..75: mol_type = other DNA
cagatataagtttaaaaattaaaaatgacacattaaaggctatttatgttggtcgctttgattatcaaaaaggta

SEQ ID NO: 885587 - DNA, 75 bp, synthetic construct
  source 1..75: mol_type = other DNA
aggctccagccagccgcgcaaaaccacggcgaccaccaccacgacgctgagcgccgacgacattactcaggcggg

SEQ ID NO: 885588 - DNA, 75 bp, synthetic construct
  source 1..75: mol_type = other DNA
ctggaagccgaacctgtaagccaaactcacaagtttccacacacgcagtttgaacagattgctaacctctacgaa

SEQ ID NO: 885589 - DNA, 75 bp, synthetic construct
  source 1..75: mol_type = other DNA
ggcattaaaggtcgcaatgcgcaactatccggcaactccggatagttggataagctgtagtgagcgaatgccgga

SEQ ID NO: 885590 - DNA, 75 bp, synthetic construct
  source 1..75: mol_type = other DNA
gcaccgtcaatatgcgcgcctggccagttaatctggtcggtggtgagctggaaacaggaaaatttcagggcacag

SEQ ID NO: 885591 - DNA, 75 bp, synthetic construct
  source 1..75: mol_type = other DNA
ggtttacttaagccaagtagtacgcgtagtgttattttagaaacgccgccaaatgtctgtatggaatcacgtaat

SEQ ID NO: 885592 - DNA, 75 bp, synthetic construct
  source 1..75: mol_type = other DNA
aggaaggcaataaaatgaaaatgcctcacagccgtgtaattggtggaggactttttgaactgagagtcggggata

SEQ ID NO: 885593 - DNA, 75 bp, synthetic construct
  source 1..75: mol_type = other DNA
cgatatcgctacgtgaaaaaaggtgttacggactctcagggggagccgtgggttggtgactggaaatatgtaccg

SEQ ID NO: 885594 - DNA, 75 bp, synthetic construct
  source 1..75: mol_type = other DNA
gatgacggtgatggcgaagacctgtatctcaaagaggtaacccactggatgccgctaccagaaccgccgcaggag

SEQ ID NO: 885595 - DNA, 75 bp, synthetic construct
  source 1..75: mol_type = other DNA
ctgagattatgcgcaaccatttagctgtattcgagcgatatggaatagccccaaacgatagctctaccacaattc

SEQ ID NO: 885596 - DNA, 75 bp, synthetic construct
  source 1..75: mol_type = other DNA
actttgcagcaaccggggataggcctgagtggagtaactgtttcagtttttcagatgctgtcgatgccgtggttg

SEQ ID NO: 885597 - DNA, 75 bp, synthetic construct
  source 1..75: mol_type = other DNA
ctggtggaagcaatcaggagcacgccgcgacttagtaaaagctggcgctcttattctggcagaaattgaacgtat

SEQ ID NO: 885598 - DNA, 75 bp, synthetic construct
  source 1..75: mol_type = other DNA
ccctgcaccacagcgaaactccagccaccgatgctttcctggctgaaattcgtgcggaagcacgcaacgagggga

SEQ ID NO: 885599 - DNA, 75 bp, synthetic construct
  source 1..75: mol_type = other DNA
cgctgcaaacagaaaaacgccacgttgccctctggaatgcaacaactgaacattgtcccgggtgcgcttcccgac

SEQ ID NO: 885600 - DNA, 75 bp, synthetic construct
  source 1..75: mol_type = other DNA
agaaggcgatcgacgccgcccacgccctgcaagagagccgacgccgaggcgataccgatttgcccgaactgagcg

SEQ ID NO: 885601 - DNA, 75 bp, synthetic construct
  source 1..75: mol_type = other DNA
ccggtggcggatttcaccgccccggtccccggtgaacaccacttccgtgaccgcgttcagcgcgttgtagcggta

SEQ ID NO: 885602 - DNA, 75 bp, synthetic construct
  source 1..75: mol_type = other DNA
tccgcgtcacaccgttaagcacctttttcccgtggatcgaaaaacaaggactgagtatcgggataatcattctga

SEQ ID NO: 885603 - DNA, 75 bp, synthetic construct
  source 1..75: mol_type = other DNA
ttaatctgggttgaatgccctgctgacacacagccgggctatacatacagtagcggcgaatttactccaccaccg

SEQ ID NO: 885604 - DNA, 75 bp, synthetic construct
  source 1..75: mol_type = other DNA
tcttttatcagatcaagatgatgtatggttaccagaaaaagtcgctacacttgtcgaattcgcagaaaagaattt

SEQ ID NO: 885605 - DNA, 75 bp, synthetic construct
  source 1..75: mol_type = other DNA
atgccttcaatcccctggaccacaaggtattccagagcgtgttcggcatgatcatgacgctcttgatcgcgatgg

SEQ ID NO: 885606 - DNA, 75 bp, synthetic construct
  source 1..75: mol_type = other DNA
ggtgtctccggtggtgttaaccgtggattttctcattcttttgtggagcactgttttgttattggccttgttagc

SEQ ID NO: 885607 - DNA, 75 bp, synthetic construct
  source 1..75: mol_type = other DNA
gacggcaggaatcccagcaatccgctggaatggcctcctatgtcgccctccactggacgtattgatgttattggt

SEQ ID NO: 885608 - DNA, 75 bp, synthetic construct
  source 1..75: mol_type = other DNA
cttttcgttttgttaacctgggtgattctgataacccgtttaacagttctcttaactggactcgtcggaaggttc

SEQ ID NO: 885609 - DNA, 75 bp, synthetic construct
  source 1..75: mol_type = other DNA
atgcagtttatgatatctttacccggattgatgacattatgagtgtgcggtatcctgaatataaaacagatgaat

SEQ ID NO: 885610 - DNA, 75 bp, synthetic construct
  source 1..75: mol_type = other DNA
tgatggaccgaatgcaggagctattggaggggctgccgcaggtgcatgggccggtggattatttggggaatatgc

SEQ ID NO: 885611 - DNA, 75 bp, synthetic construct
  source 1..75: mol_type = other DNA
cagcaccgtatctggctgaagtggtgaaaaccatgaccacagacccggttacaggtgaggtgaataaggctgcaa

SEQ ID NO: 885612 - DNA, 75 bp, synthetic construct
  source 1..75: mol_type = other DNA
aaagacggtaataatgtactgattctgtgcatgaaattttatgaatcggagaagctggataaattttcgtataat

SEQ ID NO: 885613 - DNA, 75 bp, synthetic construct
  source 1..75: mol_type = other DNA
tgacatcctacggctacgtattcaggattatcaggtatccatgcaggatagctataatcgctggcgcgtcactta

SEQ ID NO: 885614 - DNA, 75 bp, synthetic construct
  source 1..75: mol_type = other DNA
tttaactctcagaccgtcagcccgggaaccaacctgagcagcctcgatgcgcttaaacgcgattatttggcctac

SEQ ID NO: 885615 - DNA, 75 bp, synthetic construct
  source 1..75: mol_type = other DNA
attgccggggcatggtatctggggtctgctgcgtcagcaggtaaagttcttggtggcgggcttcttggactggcg

SEQ ID NO: 885616 - DNA, 75 bp, synthetic construct
  source 1..75: mol_type = other DNA
ggaacccttccggcttgccgctgattttacgattgctttttactgtcagcacccggcaatcttcctcattgcgtg

SEQ ID NO: 885617 - DNA, 75 bp, synthetic construct
  source 1..75: mol_type = other DNA
cggaacctttccggcttgccgctgattctacgattgctttttaccgtcagcacccggcaatcttcctcattgcgc

SEQ ID NO: 885618 - DNA, 75 bp, synthetic construct
  source 1..75: mol_type = other DNA
gggccattgaataccactaccccgatgaacacaccgttatccgctgtatcctgccaccggaagatgaacgcgaca

SEQ ID NO: 885619 - DNA, 75 bp, synthetic construct
  source 1..75: mol_type = other DNA
gttattgttccaacactgacatatatagcatcagttaatgctataaaatacacaggagccacccccattttcgtt

SEQ ID NO: 885620 - DNA, 75 bp, synthetic construct
  source 1..75: mol_type = other DNA
taaatcttctggcggttgcaacatccgctatagcccccttacaggatgctgttgatctggacatggcaacgaagg

SEQ ID NO: 885621 - DNA, 75 bp, synthetic construct
  source 1..75: mol_type = other DNA
caaagaactgggcgaattattgcaggcactggacaaaaaaatattctccccctactacatcgcgttaatccgcct

SEQ ID NO: 885622 - DNA, 75 bp, synthetic construct
  source 1..75: mol_type = other DNA
gtgacgcagcagaacgcatcccttgttgaagagtccgttgcagcggcggcggcacttgaagagcaggccgggttg

SEQ ID NO: 885623 - DNA, 75 bp, synthetic construct
  source 1..75: mol_type = other DNA
acctgataatattctccaaggtgttgttattaattttgctatgggagcaggactaagagagataataaaaaaggt

SEQ ID NO: 885624 - DNA, 75 bp, synthetic construct
  source 1..75: mol_type = other DNA
ggatacaaaacgtgtcgataagggcggttgtatcaacgtactgaccactcaacgtccgtctcctctcgctaaggg

SEQ ID NO: 885625 - DNA, 75 bp, synthetic construct
  source 1..75: mol_type = other DNA
tccgattgggctgaaggggggatggaacctgtatacatatccgctgagcccggtgaatggcatggatccattagg

SEQ ID NO: 885626 - DNA, 75 bp, synthetic construct
  source 1..75: mol_type = other DNA
tcttgggattgctacttttgttgttgttaatactcttgcggctgtggccttgataccagaagactccggcactac

SEQ ID NO: 885627 - DNA, 75 bp, synthetic construct
  source 1..75: mol_type = other DNA
atggggatgctggtggcgtttattattagcctgattttgtgtttcttcgtagttcgtggtgcatatcggaaacaa

SEQ ID NO: 885628 - DNA, 75 bp, synthetic construct
  source 1..75: mol_type = other DNA
gacgtctttattggcggtgagcaggtcacatatctggatatccagctggagttcccgccatggcagagaatgatc

SEQ ID NO: 885629 - DNA, 75 bp, synthetic construct
  source 1..75: mol_type = other DNA
gtaagtaaaaagggaggcgataaaggttttagattcgaagtgaatgcgaatttcccattatcactccaagagatg

SEQ ID NO: 885630 - DNA, 75 bp, synthetic construct
  source 1..75: mol_type = other DNA
ggttgaaaagttatcggcatttttatgatgctgaaattattgtttatattgaaggtagactattagataaagata

SEQ ID NO: 885631 - DNA, 75 bp, synthetic construct
  source 1..75: mol_type = other DNA
tctcgcaccgaagaacaagcggcggctatcgaacaaactgccgccagcatggagcaactcactgcgacggtgaaa

SEQ ID NO: 885632 - DNA, 75 bp, synthetic construct
  source 1..75: mol_type = other DNA
tacctgggaattgaaaaaagatgaaattattcatccccttcctgcgtataccccaggttttgatggctgggacga

SEQ ID NO: 885633 - DNA, 75 bp, synthetic construct
  source 1..75: mol_type = other DNA
ttctcaccggcaacgtcggcataaacggcggcaactcaggcgtacgcgaaggtagctgggatctgggggtagaat

SEQ ID NO: 885634 - DNA, 75 bp, synthetic construct
  source 1..75: mol_type = other DNA
ggatattgaaaacagcaagctggtcgtgatgtttggtaacaacccggcagaaacccgcatgagcggtggtggcat

SEQ ID NO: 885635 - DNA, 75 bp, synthetic construct
  source 1..75: mol_type = other DNA
tcccaacagaatcttgatattcaaagttctgagggcaaagtgactgtttctgctaatcaggaactgatactggca

SEQ ID NO: 885636 - DNA, 75 bp, synthetic construct
  source 1..75: mol_type = other DNA
ttcactgttgcggctacagatacgataagtttatttgcccgtgatgctggtatgcagctattcgcgggggacggt

SEQ ID NO: 885637 - DNA, 75 bp, synthetic construct
  source 1..75: mol_type = other DNA
ttttacagcctcaaaagctggagttcaatgagtttgagattcttaatcccgtagttgagggcgcccgaattgtcg

SEQ ID NO: 885638 - DNA, 75 bp, synthetic construct
  source 1..75: mol_type = other DNA
actattatatcttgctttctttttattatcacctttaatttctgacttttataatgatcagagattaactgatat

SEQ ID NO: 885639 - DNA, 75 bp, synthetic construct
  source 1..75: mol_type = other DNA
gtcaatcgcctttggtcaagcccaaaatagaattagagatttatatcacttatggaagacaggacagttcgacgg

SEQ ID NO: 885640 - DNA, 75 bp, synthetic construct
  source 1..75: mol_type = other DNA
atcatttcaaacaatggctgaaatacatatacaaccatgagtggaaggattattgtacaaagaaagggtcattaa

SEQ ID NO: 885641 - DNA, 75 bp, synthetic construct
  source 1..75: mol_type = other DNA
gtggggcgattcaggcatcccggctatctgaatggctcaactcaacagccggtgctcatgaacttgagcgatttt

SEQ ID NO: 885642 - DNA, 75 bp, synthetic construct
  source 1..75: mol_type = other DNA
attgatgatcgggtagaggaattatttgcgagtatgccggactgcttaaaacaggaagatcgtgtaacgcatgaa

SEQ ID NO: 885643 - DNA, 75 bp, synthetic construct
  source 1..75: mol_type = other DNA
gccttttcaggccatctaccaccaccgagaaatatcttgcaattcgttgtatttatattttcctgtactattatg

SEQ ID NO: 885644 - DNA, 75 bp, synthetic construct
  source 1..75: mol_type = other DNA
gtcatcgacgcctgtggtacggagaattcatgtctgacattgacagatgcccccatggaagcaaagcgaatgcgg

SEQ ID NO: 885645 - DNA, 75 bp, synthetic construct
  source 1..75: mol_type = other DNA
taaggataattctgctggcgcacaacaatcatttacaaaaaactccagtttccttttcaggcgagcttacggctg

SEQ ID NO: 885646 - DNA, 75 bp, synthetic construct
  source 1..75: mol_type = other DNA
accccacgttgatgcgctgactcagttgttgacgtccattgatggccagtcggcggttatttcatcggcaaaatg

SEQ ID NO: 885647 - DNA, 75 bp, synthetic construct
  source 1..75: mol_type = other DNA
atatcctcatatggattgagaatcacatagaagatgggattataattgaagatgtcgtgaatctttctggttaca

SEQ ID NO: 885648 - DNA, 75 bp, synthetic construct
  source 1..75: mol_type = other DNA
aaaaagcattacaggcaatgccagagaacctggcgaaccttccccgctcgcagctgtatctgaagccatttaatc

SEQ ID NO: 885649 - DNA, 75 bp, synthetic construct
  source 1..75: mol_type = other DNA
accggaaaagggctggtcatgacgatgggtaaaggcggtgtgggtaaaacgaccgttgcggcatcagtggcggta

SEQ ID NO: 885650 - DNA, 75 bp, synthetic construct
  source 1..75: mol_type = other DNA
gccgatgtggtcagcagcattgaagagcagctctctggctcatgcaccacggaaatcgctgcgtttgatgagttt

SEQ ID NO: 885651 - DNA, 75 bp, synthetic construct
  source 1..75: mol_type = other DNA
tatgatgaatggggcaccctgctgagtgatgagaacccgcatcatctgcagcagctcattcgcctgccgggccag

SEQ ID NO: 885652 - DNA, 75 bp, synthetic construct
  source 1..75: mol_type = other DNA
ctcgctggtggatgaactcagcctgacaggtaaaggtctggtaatgacgatgggtaaaggcggtgtgggcaaaac

SEQ ID NO: 885653 - DNA, 75 bp, synthetic construct
  source 1..75: mol_type = other DNA
gaatctggcgaacctcccccgttcgcagctgtatctgaagccatttaatctggtcggtttggaagccctgcggga

SEQ ID NO: 885654 - DNA, 75 bp, synthetic construct
  source 1..75: mol_type = other DNA
gagaagaaaataatgagatttatttatccggtcttgtggcaggcgataaaattattgaggctactaccgaaaatg

SEQ ID NO: 885655 - DNA, 75 bp, synthetic construct
  source 1..75: mol_type = other DNA
gggtttggtagttactttgaatatcatactctcaaggaatgtttgtcattgctttttgaacttccagatttaacc

SEQ ID NO: 885656 - DNA, 75 bp, synthetic construct
  source 1..75: mol_type = other DNA
aagagtataataaaattcataagaaacctgaggaagttatcagagaattatcaagcaagaacactaataaagttg

SEQ ID NO: 885657 - DNA, 75 bp, synthetic construct
  source 1..75: mol_type = other DNA
ctatcggccaccgaatcacagatatcagtactgtagaaaatcttgccgcgatggaagttgatccgatggctgcag

SEQ ID NO: 885658 - DNA, 75 bp, synthetic construct
  source 1..75: mol_type = other DNA
ggccaggtgttcagccagactattggcaataccattctgccggtggcctctgtaccgggtctttcagcgctggaa

SEQ ID NO: 885659 - DNA, 75 bp, synthetic construct
  source 1..75: mol_type = other DNA
ttgcagtacaagttatgctgcttcttttgtttgtaatacagtagcttcaggtgttgaaaaaatgatttgctcaga

SEQ ID NO: 885660 - DNA, 75 bp, synthetic construct
  source 1..75: mol_type = other DNA
ttggtttaaacgtagcaatgatgcctgttatttcgcatgggcatatatcagggttttgagtaataagaacagatc

SEQ ID NO: 885661 - DNA, 75 bp, synthetic construct
  source 1..75: mol_type = other DNA
ggacagcaacaacgttctggatccacaagcccaggcggaggccgcgagcacgttagtcaatacgctgatgggtca

SEQ ID NO: 885662 - DNA, 75 bp, synthetic construct
  source 1..75: mol_type = other DNA
aaacacctggcgaaaatcatcattctggcaccgatggcggtgctgctgatctatctggctatcttcagccagcct

SEQ ID NO: 885663 - DNA, 75 bp, synthetic construct
  source 1..75: mol_type = other DNA
gtactttcgccatcttcctttaaattttctacagcatcagctattgcgtgtggtactcgagcctcaagctttttg

SEQ ID NO: 885664 - DNA, 75 bp, synthetic construct
  source 1..75: mol_type = other DNA
gaatatctgaaagagtgccctcattgtggtgggcagaaatgcaaccactgcgatatgggcgatgacacggcgtgc

SEQ ID NO: 885665 - DNA, 75 bp, synthetic construct
  source 1..75: mol_type = other DNA
tcagttaatggcggaactgccactacctgtatcagaaagcaactttatagtttttatacagcctacaaccgatgg

SEQ ID NO: 885666 - DNA, 75 bp, synthetic construct
  source 1..75: mol_type = other DNA
cgcatcgcattgcgcgcgatcagcttgcctttgcagaaagcgagatggaaaaagcgcgccagcgtctggatgcca

SEQ ID NO: 885667 - DNA, 75 bp, synthetic construct
  source 1..75: mol_type = other DNA
ggcgttaaccagatagagacggtgggcagtaaccagatcattaacgtgggttctgttcaggtggaaacgattgga

SEQ ID NO: 885668 - DNA, 75 bp, synthetic construct
  source 1..75: mol_type = other DNA
atacaacgaatacatttcggcctgcgcatatgcccgcgccgaagaagaatggcagcgtcaagcgccctgcccgtt

SEQ ID NO: 885669 - DNA, 75 bp, synthetic construct
  source 1..75: mol_type = other DNA
gctaataatggtgccagcgacaacaaaactgtgcattttattggcgacacagcggcggcaaaaattatcgagttg

SEQ ID NO: 885670 - DNA, 75 bp, synthetic construct
  source 1..75: mol_type = other DNA
ttttataattttgatatggatgactatctgaaagggcgagagttttatttcgattataactcaataatttgtggc

SEQ ID NO: 885671 - DNA, 75 bp, synthetic construct
  source 1..75: mol_type = other DNA
aatttattttgggacgaattgtttactttttgtctggtttttttcctagaaatccaaatatatgggtttttggta

SEQ ID NO: 885672 - DNA, 75 bp, synthetic construct
  source 1..75: mol_type = other DNA
tggtaaaacgaaaaaggatgataccgggcagaccgcgatttactccgccggtgagcatctggagctctgctgtgg

SEQ ID NO: 885673 - DNA, 75 bp, synthetic construct
  source 1..75: mol_type = other DNA
cgtttatctttggtccggcagctgttgaaggcggcattcagatgtactgggcgcagcatctgcaagagttcagtc

SEQ ID NO: 885674 - DNA, 75 bp, synthetic construct
  source 1..75: mol_type = other DNA
aacactgaagctgatgtgtttgttattggcttgattggcgaacgtggtagggaagttacggaatgcgcggaatcg

SEQ ID NO: 885675 - DNA, 75 bp, synthetic construct
  source 1..75: mol_type = other DNA
agcgatgtttcgattggtgagatttgtaacattcaggctggaattgaaagtaatgaaattattgcaagagctcag

SEQ ID NO: 885676 - DNA, 75 bp, synthetic construct
  source 1..75: mol_type = other DNA
tgaaaatgaccgcgccatgcagctgcgccgaccactggagcggtggttatgccagccggttagccagtactcttc

SEQ ID NO: 885677 - DNA, 75 bp, synthetic construct
  source 1..75: mol_type = other DNA
tcctttcgtaaagcaaaaaagaaaagtaagaacaaaatcttaaagttaactaaaagagaacttgacggcaatgac

SEQ ID NO: 885678 - DNA, 75 bp, synthetic construct
  source 1..75: mol_type = other DNA
atgcattataaaaatagaagaagttacagataacggttttatagtaaaactattatctaaagatggtgcaagaga

SEQ ID NO: 885679 - DNA, 75 bp, synthetic construct
  source 1..75: mol_type = other DNA
atgagcaaggtcactttaaacaccaaccacggcgacatcgttattcagttgcatgatgacaaagcgcctgagacg

SEQ ID NO: 885680 - DNA, 75 bp, synthetic construct
  source 1..75: mol_type = other DNA
gatgcaaaagcgatattagctcgtactgatattcaaacccaaggtgataatgctaatggtataaatatcataaat

SEQ ID NO: 885681 - DNA, 75 bp, synthetic construct
  source 1..75: mol_type = other DNA
tattcaaacaataaatgaaaacgtcattccatttttattgaaaatgaaatcaccaaaccttagtataagcaaaaa

SEQ ID NO: 885682 - DNA, 75 bp, synthetic construct
  source 1..75: mol_type = other DNA
caaatcgtacacattattgaagagggcggttggacggtattccgtactatgccgctgatttttgctgtcggttta

SEQ ID NO: 885683 - DNA, 75 bp, synthetic construct
  source 1..75: mol_type = other DNA
caatggaagttaccagtggtttgatttaagccagccaggtaatgaaaacaaaaactgggactggaaaagcagtgc

SEQ ID NO: 885684 - DNA, 75 bp, synthetic construct
  source 1..75: mol_type = other DNA
caagtactgttggtgatattggtggtggctttgtttctgagttaataaactacggtattaaaaattatcctactc

SEQ ID NO: 885685 - DNA, 75 bp, synthetic construct
  source 1..75: mol_type = other DNA
aataccgcttatgcgagcgggtcaggttctgttcttaatttcttacctggaactgtaatcagtagtaatggtgtt

SEQ ID NO: 885686 - DNA, 75 bp, synthetic construct
  source 1..75: mol_type = other DNA
gaatggctggcggcacaaggtcatgaggtgcgggtcattaccgcaccgccttactacccgcagtggcaggtgggc

SEQ ID NO: 885687 - DNA, 75 bp, synthetic construct
  source 1..75: mol_type = other DNA
tgcttgcttcgctctcggttatttccggcgctcaggctgggattcccgttgctattgatgccaatcctgaatggg

SEQ ID NO: 885688 - DNA, 75 bp, synthetic construct
  source 1..75: mol_type = other DNA
acagcctgaaacacacggcagcctgattcaggccggtgagctctggcacggtatggtcgccattaccctgccccc

SEQ ID NO: 885689 - DNA, 75 bp, synthetic construct
  source 1..75: mol_type = other DNA
aaagagactaataaacaggagaaaaaaacacatcaagacgatataaaatttgtgactaaagatttcatctgcggg

SEQ ID NO: 885690 - DNA, 75 bp, synthetic construct
  source 1..75: mol_type = other DNA
tttgcatttagtcaactgatatcaggtactataggtgatcattttggaaaggtacgcgtgatgactatatgctta

SEQ ID NO: 885691 - DNA, 75 bp, synthetic construct
  source 1..75: mol_type = other DNA
ggcgcgaaatcagcagattaagcacgggttttatcgtgatttaccacgactatggatgcagcctgatggggacgc

SEQ ID NO: 885692 - DNA, 75 bp, synthetic construct
  source 1..75: mol_type = other DNA
cggagaattgctgcccttcacccgtatacctgacgatgatgttcatcttattcgtgaattacgggatgctgaatc

SEQ ID NO: 885693 - DNA, 75 bp, synthetic construct
  source 1..75: mol_type = other DNA
atgatattacaacccatggggagaaaaggccgtgcacccgctcatgttcgcgcatggacacctgaagaagatgcg

SEQ ID NO: 885694 - DNA, 75 bp, synthetic construct
  source 1..75: mol_type = other DNA
gaagataagtttattcgaaaaaatgccagaacaatgacctgccagcaaatgggagaatatctcggacgtaataaa

SEQ ID NO: 885695 - DNA, 75 bp, synthetic construct
  source 1..75: mol_type = other DNA
ctcaaatactattcaaagtactaattacgtagcaaataaaacaggctggcaaatcaataaagcaggtacgatcct

SEQ ID NO: 885696 - DNA, 75 bp, synthetic construct
  source 1..75: mol_type = other DNA
tagtatcactactgcgaagattgcaaatactatacagagtaataactatgtagcaaatagcactggctggcagat

SEQ ID NO: 885697 - DNA, 75 bp, synthetic construct
  source 1..75: mol_type = other DNA
acggtcgattacctttcgctttgcgatgtacctccaacaatgtttccccggttggactgtagattgcgaatacaa

SEQ ID NO: 885698 - DNA, 75 bp, synthetic construct
  source 1..75: mol_type = other DNA
gtggtccaccatcattaccaggaattgctgcatgtatcgcagcagcagatttacacctcgatggcacagtatcct

SEQ ID NO: 885699 - DNA, 75 bp, synthetic construct
  source 1..75: mol_type = other DNA
catcgactcaactaaagagctcgaactaaaaatagagagctttgttaccatttgcaataaatatctacagttatc

SEQ ID NO: 885700 - DNA, 75 bp, synthetic construct
  source 1..75: mol_type = other DNA
ttattgtcaccggtaatttccccggctggctctttctctcggtgataccggtcctgcttttgcagatcctgtttg

SEQ ID NO: 885701 - DNA, 75 bp, synthetic construct
  source 1..75: mol_type = other DNA
gcgaactcttatctgccatcaaactggctttctgcgttggggctgtacgcctgggcgcgggtcgatgaatcttcc

SEQ ID NO: 885702 - DNA, 75 bp, synthetic construct
  source 1..75: mol_type = other DNA
cattaccatatttagtacacaaattagggccagagtcatatggaatacttggcttttctctagcactaattcaat

SEQ ID NO: 885703 - DNA, 75 bp, synthetic construct
  source 1..75: mol_type = other DNA
gaaaaaagaattaacaccattcataatcgcctcattgaactaatgttaaagcatgagcgcattctaaaaaagaac

SEQ ID NO: 885704 - DNA, 75 bp, synthetic construct
  source 1..75: mol_type = other DNA
gattcttaatgaatacaacaataaaaaaatagatataaattcagcacgcgaaaaattaaataaaacaaaatcact

SEQ ID NO: 885705 - DNA, 75 bp, synthetic construct
  source 1..75: mol_type = other DNA
acgtatgcttttggtggcccgccatcattaccagggattgctgcatgtattgcagcggctgatttacacctcgat

SEQ ID NO: 885706 - DNA, 75 bp, synthetic construct
  source 1..75: mol_type = other DNA
tggataacaagcttgatgatagaattatcatcgcgggttcattatctaaagcctttggttctcatggtggattta

SEQ ID NO: 885707 - DNA, 75 bp, synthetic construct
  source 1..75: mol_type = other DNA
ttaatgatgggagggaaatgattgagtttgtgtcatgctcttatcttggactggaaacacatgaaaatttaaaat

SEQ ID NO: 885708 - DNA, 75 bp, synthetic construct
  source 1..75: mol_type = other DNA
aatgcggttatgatggatcaggtgtttcctgagtggcgaaatgaaactaaacctacacaacataagaaacctaca

SEQ ID NO: 885709 - DNA, 75 bp, synthetic construct
  source 1..75: mol_type = other DNA
atggaatcagagattaaaacacttaaagctgataataaggcgttgagaaagtccttaaagctgattgatgagact

SEQ ID NO: 885710 - DNA, 75 bp, synthetic construct
  source 1..75: mol_type = other DNA
cgttgtgcaatatctgctattcataccagagaaaatatagatagcctacataaaaactttatggaatgtattaac

SEQ ID NO: 885711 - DNA, 75 bp, synthetic construct
  source 1..75: mol_type = other DNA
gcgaagataaagagttcgctggtttaatatgtaaggataatagtggcagatatttctcaacagcacctaaccgag

SEQ ID NO: 885712 - DNA, 75 bp, synthetic construct
  source 1..75: mol_type = other DNA
gcctggtgaaaccttcggagaactcatcacgttgtcagtcaacgagctggctgaacagcctggcgtcggtgtgct

SEQ ID NO: 885713 - DNA, 75 bp, synthetic construct
  source 1..75: mol_type = other DNA
ttagtcgttgctggcggggttatggaaaacatggtctcagctgagcggataaaaaaacatttattccaggcgcag

SEQ ID NO: 885714 - DNA, 75 bp, synthetic construct
  source 1..75: mol_type = other DNA
tgattatcggattggcaccgggaggggccgtgcggatctggctggaggataatggcgagcctgttgtactccaac

SEQ ID NO: 885715 - DNA, 75 bp, synthetic construct
  source 1..75: mol_type = other DNA
tttctgccggggccagctactacatgacgtttatgaatgtcatgattggttacggaattgtcgcttcggtaatga

SEQ ID NO: 885716 - DNA, 75 bp, synthetic construct
  source 1..75: mol_type = other DNA
cgcgactaaattatcactacgctgtatgtttgtccgcgaaggcggaacggaagataacccacaacgtacgctcaa

SEQ ID NO: 885717 - DNA, 75 bp, synthetic construct
  source 1..75: mol_type = other DNA
ttctgcattttggaaagccagtagagccctccatatatcatcggcaatggacatgctctgcgattctggggctcc

SEQ ID NO: 885718 - DNA, 75 bp, synthetic construct
  source 1..75: mol_type = other DNA
agagaacggttccttcatgcccgtcggcgtttttgccccatgtcagaaaaaacaaccggtaagctaccggaaggg

SEQ ID NO: 885719 - DNA, 75 bp, synthetic construct
  source 1..75: mol_type = other DNA
acaaaggcacccggcacgacggttattacgagaccgccatcaccgccgggtcatccaccgttttatcgatggtct

SEQ ID NO: 885720 - DNA, 75 bp, synthetic construct
  source 1..75: mol_type = other DNA
ggcaacaaaaccggaaggtgcagccgcgcgtgatgttcatgaggctgccgcggatgcaaccgcggctttttattg

SEQ ID NO: 885721 - DNA, 75 bp, synthetic construct
  source 1..75: mol_type = other DNA
cagcagcggtcagctcagtacccaggccaaccgttacgttgcccagctcggtggggacttaacgcaatggagctc

SEQ ID NO: 885722 - DNA, 75 bp, synthetic construct
  source 1..75: mol_type = other DNA
gcgtgatagtgggcgtaatgctggctgtcggctgccatgaccgtagggctggtgtgaggacgctgctgggcgatg

SEQ ID NO: 885723 - DNA, 75 bp, synthetic construct
  source 1..75: mol_type = other DNA
acgggagtttaaaacctttgatgagtttcgcgaggcgctgtggctggaggtgagtcaggatccggagttgatagc

SEQ ID NO: 885724 - DNA, 75 bp, synthetic construct
  source 1..75: mol_type = other DNA
tgtatcgaggttattcttgtgataccgcgactaaattatcactacgctgtatgtttgttcgtgagggcggaacgg

SEQ ID NO: 885725 - DNA, 75 bp, synthetic construct
  source 1..75: mol_type = other DNA
gactcgcgttttatgatcgacgcagacggcactgaagatattccgttgaacaataaacgcgcggtaactaatcgg

SEQ ID NO: 885726 - DNA, 75 bp, synthetic construct
  source 1..75: mol_type = other DNA
gcttcaggcgacaatgatgaattcaaagatatgaaagcgtcactacgcgccagttatcagcataataccgagaac

SEQ ID NO: 885727 - DNA, 75 bp, synthetic construct
  source 1..75: mol_type = other DNA
ctgccgcgtccggcaaccggaaaccggtggtgaaaatcgcatcttctgccggcgctgcggcacagtcaacaaccg

SEQ ID NO: 885728 - DNA, 75 bp, synthetic construct
  source 1..75: mol_type = other DNA
tgacgccctatgcaaccggtcctggggtgattatttacggctgtggctatgtgaaatcaaaagattactggcgtc

SEQ ID NO: 885729 - DNA, 75 bp, synthetic construct
  source 1..75: mol_type = other DNA
gtcttctgcccgtagccgtatcgaagatgctgactacgcgaccgaagtgtctaacatgtctcgtgcgcagatcct

SEQ ID NO: 885730 - DNA, 75 bp, synthetic construct
  source 1..75: mol_type = other DNA
accaacccgctcgaaaccatcgacaaggcattggctaaagttgacaatctgcgttctgacctcggtgcagtacaa

SEQ ID NO: 885731 - DNA, 75 bp, synthetic construct
  source 1..75: mol_type = other DNA
caccctattaccgatcggcaactgcacgatatgttagtgcgtgttgataccagtaacaggcaggcaatagactcc

SEQ ID NO: 885732 - DNA, 75 bp, synthetic construct
  source 1..75: mol_type = other DNA
aaggtcgctgccatatttcctttgtcaaagagcgcggtgtggcacccgccaccattgattttccaccgcgattat

SEQ ID NO: 885733 - DNA, 75 bp, synthetic construct
  source 1..75: mol_type = other DNA
gagcatgatggtcgccactggcgacgaataccagaaccaatgcgactgttagatgatgctgtggagcgctcatca

SEQ ID NO: 885734 - DNA, 75 bp, synthetic construct
  source 1..75: mol_type = other DNA
tttctctggcagcatgaccattcccgcccggtggggcagtgtacggtacgccgggtcagcgaagggctggaaatc

SEQ ID NO: 885735 - DNA, 75 bp, synthetic construct
  source 1..75: mol_type = other DNA
atattccagcccccaaaatcacagtccgctcgagcgattatacacaagattcccattgtccgggtgttaaagaga

SEQ ID NO: 885736 - DNA, 75 bp, synthetic construct
  source 1..75: mol_type = other DNA
caagaagacctgaaagaaagactgaaagaaatcaaggaagatatcctggaagaaaaccagtcagcaagccagatt

SEQ ID NO: 885737 - DNA, 75 bp, synthetic construct
  source 1..75: mol_type = other DNA
gattttctggatgcaaacagggaggagtgtatcagtccgtttgaatatgcaaagattaacaatccattaaaatag

SEQ ID NO: 885738 - DNA, 75 bp, synthetic construct
  source 1..75: mol_type = other DNA
gcgatacgcctgttatcaaaatcgatgggcactctactctgtatctaaatggggattcaacaatcagtggtgttt

SEQ ID NO: 885739 - DNA, 75 bp, synthetic construct
  source 1..75: mol_type = other DNA
tatcgccaccattggaattgaaaccaaaggtgtctccgttgaaagtttaagtattgatgcagtagccaataaata

SEQ ID NO: 885740 - DNA, 75 bp, synthetic construct
  source 1..75: mol_type = other DNA
gatattgaaaatgccatgtggaccattcctgccgaacgcgagcctctgccaggtgtgaaattctcacaccggggt

SEQ ID NO: 885741 - DNA, 75 bp, synthetic construct
  source 1..75: mol_type = other DNA
ctggatgcttaccactggaaagaggatggtatcagcgataaaggcgtgatgctgaacttcaagaaaacgttctaa

SEQ ID NO: 885742 - DNA, 75 bp, synthetic construct
  source 1..75: mol_type = other DNA
ccttctgttggcattcaggtgcagggacacgacaataatatcgtattaaatggcaatcttaccattgttgctgac

SEQ ID NO: 885743 - DNA, 75 bp, synthetic construct
  source 1..75: mol_type = other DNA
gtatatggccttttcttcagctttgagatctgctgatttatcaagacaagttggagctgtattagcaaaaaatta

SEQ ID NO: 885744 - DNA, 75 bp, synthetic construct
  source 1..75: mol_type = other DNA
catttggctgatttctttttaaaccaagatggccgagatgataaacttaataatgatataaaaagagtttttgat

SEQ ID NO: 885745 - DNA, 75 bp, synthetic construct
  source 1..75: mol_type = other DNA
cgtttctcttagcggcgatgcgtcgacgtttattaatatgggggatatatctgttagtaatggcagttcagaggc

SEQ ID NO: 885746 - DNA, 75 bp, synthetic construct
  source 1..75: mol_type = other DNA
tacgtttgctatgcctcggcagtgtatgtccctgaaatctggccgacagaggccaaactccgtggctccggtctg

SEQ ID NO: 885747 - DNA, 75 bp, synthetic construct
  source 1..75: mol_type = other DNA
gtgatgcggatagtgagaatctgctgattcatggggataatctactggcgttgaaggcactggagcagaagtatg

SEQ ID NO: 885748 - DNA, 75 bp, synthetic construct
  source 1..75: mol_type = other DNA
ggaaccgtgataccgccgcaaccgctgttgaaaacctgatccgtgatttacagcttccgaaggttgtaaaaacat

SEQ ID NO: 885749 - DNA, 75 bp, synthetic construct
  source 1..75: mol_type = other DNA
atcctgctctggatatggctggcgcattgaccacggtaaaacgccagcatcgccccgctcttgacctttcacgcc

SEQ ID NO: 885750 - DNA, 75 bp, synthetic construct
  source 1..75: mol_type = other DNA
atgcgatcaattcaggtattaagttaaccaggatggatttgctcttcgggggaataaatacttttgttgccgcct

SEQ ID NO: 885751 - DNA, 75 bp, synthetic construct
  source 1..75: mol_type = other DNA
agaaacagacgacgaatggatgacagaatgtgccagagcaagtcatattcatgatgtgataatgaaaatgccaat

SEQ ID NO: 885752 - DNA, 75 bp, synthetic construct
  source 1..75: mol_type = other DNA
atgaataaactgcttttactgttgataatgctctatcaacgacatctttctcctcgcaaaggataccgctgtgct

SEQ ID NO: 885753 - DNA, 75 bp, synthetic construct
  source 1..75: mol_type = other DNA
gagaggaagaatcatttatctttttgaaatggatatgcggagttgtaagtgtaatctctatatatggtgcaatta

SEQ ID NO: 885754 - DNA, 75 bp, synthetic construct
  source 1..75: mol_type = other DNA
atggatttatcggcgcaagtattaatggttcatatgtggagtggtgtttttgtttttttaggatcattttcatct

SEQ ID NO: 885755 - DNA, 75 bp, synthetic construct
  source 1..75: mol_type = other DNA
gaagtcaaagaatgaactctatcttttggctgacgaagggcatccttcaactgaagaaattataacggcattttc

SEQ ID NO: 885756 - DNA, 75 bp, synthetic construct
  source 1..75: mol_type = other DNA
gtatgcgttgcactattttatttatggatgctccaaatctattttctctgacaaaatcatgtaaatttgacgtta

SEQ ID NO: 885757 - DNA, 75 bp, synthetic construct
  source 1..75: mol_type = other DNA
gctgaccgtactctgtttcgcaccattgccgcagcactggtatcacgcaaccagcaaggaacacttaatttcaga

SEQ ID NO: 885758 - DNA, 75 bp, synthetic construct
  source 1..75: mol_type = other DNA
ccctgcaagacgttgccgccaagcagtacgcagagaacagccagcacgtcaccgacaagctgagcgtatttactg

SEQ ID NO: 885759 - DNA, 75 bp, synthetic construct
  source 1..75: mol_type = other DNA
gggtggagcgagatacgtcagcgttttgcagattgccgacttgcagcacagacaatcaggcagaaacaacgcctg

SEQ ID NO: 885760 - DNA, 75 bp, synthetic construct
  source 1..75: mol_type = other DNA
aggaacggacagttatggtggcgcaaggcaaaatgctaccgcgcttaaccagcagtcaggtactatcactatcta

SEQ ID NO: 885761 - DNA, 75 bp, synthetic construct
  source 1..75: mol_type = other DNA
tcatccacccggtggtatcgtcggcggtgacgaactcatcatcaacgcaataattgactctgattgccatacgct

SEQ ID NO: 885762 - DNA, 75 bp, synthetic construct
  source 1..75: mol_type = other DNA
gcaatcagaagtggtctgcatcgcatagcgctcgtgtattgaaaagcctcgaagataatctctttgctgctatcg

SEQ ID NO: 885763 - DNA, 75 bp, synthetic construct
  source 1..75: mol_type = other DNA
aacttacaagtgggcagccaaaagttggggaatgctatggctgcacccagagttaattcacaaattcccttaccc

SEQ ID NO: 885764 - DNA, 75 bp, synthetic construct
  source 1..75: mol_type = other DNA
tgaatgttaagacgatcccttcggtagataaaaatgcattgaacggcaggaatgttttgcaactggcgattttat

SEQ ID NO: 885765 - DNA, 75 bp, synthetic construct
  source 1..75: mol_type = other DNA
ctttttggagagcatattattagctggggcagaagtgctcatagatcctaaaaaaggccaaaacaaagcgattgt

SEQ ID NO: 885766 - DNA, 75 bp, synthetic construct
  source 1..75: mol_type = other DNA
caactttctcctccatattggagctattggaatttttgcaacaacaatatttttaatggtttttggtatggaaat

SEQ ID NO: 885767 - DNA, 75 bp, synthetic construct
  source 1..75: mol_type = other DNA
ttagaactgcattcatgaagttgatgtttttgtgtttagcagttattttaattaatatgtttacatttaaaaatc

SEQ ID NO: 885768 - DNA, 75 bp, synthetic construct
  source 1..75: mol_type = other DNA
tgggcgttgggttcatcagccggcgtaagtaagatgctgtcgctaaaaaatttctttagcggagctgagatactg

SEQ ID NO: 885769 - DNA, 75 bp, synthetic construct
  source 1..75: mol_type = other DNA
gacatttgatggttctcagtggcgtacagtcagcgtgggtgagtatgtgtcgtcaggagcttcggggtttgagta

SEQ ID NO: 885770 - DNA, 75 bp, synthetic construct
  source 1..75: mol_type = other DNA
taaaatatcccgcattgacactaagaatacatccgatattggaactttatttcccataataaaacagagcaaaaa

SEQ ID NO: 885771 - DNA, 75 bp, synthetic construct
  source 1..75: mol_type = other DNA
agcatataccccatataatatacacacttacaagacagaggaagttgtaaaccagaggaatataaaagttaaaaa

SEQ ID NO: 885772 - DNA, 75 bp, synthetic construct
  source 1..75: mol_type = other DNA
gttgcctttatcagcaggatgttgtggattatctcgttaaacaacataacgagcagcacctcaaagaaaatgcgg

SEQ ID NO: 885773 - DNA, 75 bp, synthetic construct
  source 1..75: mol_type = other DNA
atgggccgagggggattacctgtctgtcacgtttgagaccacaacgaccacccatgcggcccgtgcagattacat

SEQ ID NO: 885774 - DNA, 75 bp, synthetic construct
  source 1..75: mol_type = other DNA
cactgatacggaaaatgaccattgacagggttatcgaacatatcgagcttcatcttgaaagcggtaaacggatga

SEQ ID NO: 885775 - DNA, 75 bp, synthetic construct
  source 1..75: mol_type = other DNA
gcaccagttgaccgagcagtatatcagcgactacaccgccacctggcgggctgggatggacaatctgaatatccg

SEQ ID NO: 885776 - DNA, 75 bp, synthetic construct
  source 1..75: mol_type = other DNA
ttgtaccttgaggtttcggccaaaggatcaaaatattggcgtatgaaatacagacgcccctctgacaaaaaagag

SEQ ID NO: 885777 - DNA, 75 bp, synthetic construct
  source 1..75: mol_type = other DNA
ctgggcggggagcagacttaccggtatgtgccgaatccttgtgggtgggttgatccgctgggattggctgcaagt

SEQ ID NO: 885778 - DNA, 75 bp, synthetic construct
  source 1..75: mol_type = other DNA
ctggtgtttaacggctttgagctgataagccagcagttcagccgggtacggcagccgcacccgtccgtggccccg

SEQ ID NO: 885779 - DNA, 75 bp, synthetic construct
  source 1..75: mol_type = other DNA
gcagtggtggtcggattatctcgacgcctgtcggcagaagtttattgcgccgtaccggtatgacaggcaggttca

SEQ ID NO: 885780 - DNA, 75 bp, synthetic construct
  source 1..75: mol_type = other DNA
ctggcgcttggtcagtatcccgaagtctcactgtcagaagcgcgcgaaaaacgcgatgaggccagaaaactcata

SEQ ID NO: 885781 - DNA, 75 bp, synthetic construct
  source 1..75: mol_type = other DNA
atgacacggatcgcggtcgagctttccttgctaacttttgtgcgttccagtgagttacgtttcgcgcgttgggat

SEQ ID NO: 885782 - DNA, 75 bp, synthetic construct
  source 1..75: mol_type = other DNA
agaggaggctgttacagcatctaattacgaagaaattaacaagcaggtcactaacaaaaaaattgctctccaggc

SEQ ID NO: 885783 - DNA, 75 bp, synthetic construct
  source 1..75: mol_type = other DNA
atgttaccttctgttggttcattcattcttcactggatagaattaaatctggattcaggaaaaaacattagcgat

SEQ ID NO: 885784 - DNA, 75 bp, synthetic construct
  source 1..75: mol_type = other DNA
actgatcatcttcgtcacctggtttttggtggaagtcggggtcgccgtcaacgcctggtatgcaccgttctatga

SEQ ID NO: 885785 - DNA, 75 bp, synthetic construct
  source 1..75: mol_type = other DNA
cgtttacaaatatatttatcaaggaagttgaaagaattattggggtaataaaagtaaacgatgaaaagagtgttt

SEQ ID NO: 885786 - DNA, 75 bp, synthetic construct
  source 1..75: mol_type = other DNA
aattcttaaaagtaaaataaaaaggttaggagttagatattcagatactgagatatacgatgatgtcatcttagg

SEQ ID NO: 885787 - DNA, 75 bp, synthetic construct
  source 1..75: mol_type = other DNA
gatgctggctttgtccgctcattcgtcgccgtgaacctcacgttgccggacttgttctggggttaatcctcattc

SEQ ID NO: 885788 - DNA, 75 bp, synthetic construct
  source 1..75: mol_type = other DNA
cgatatgaaaaatatccttgcgcagctggttgaggcggagaaatccgcgcaggccaatgtgattcgccgacgtga

SEQ ID NO: 885789 - DNA, 75 bp, synthetic construct
  source 1..75: mol_type = other DNA
tggttgacacccgcttgcaggtactggaagtcagcgggcaagaaatcttaacgaaagataaggtcaatctgcgga

SEQ ID NO: 885790 - DNA, 75 bp, synthetic construct
  source 1..75: mol_type = other DNA
gctgaacggatcgataacatctctgtatttggcggtctggatcaggtgctgcacgggttagttaatatcaaagga

SEQ ID NO: 885791 - DNA, 75 bp, synthetic construct
  source 1..75: mol_type = other DNA
aaccgaaaaatggaaatcctgctgggaacgctggtgacaatcgatccggtacgggcagcggtattgtgtgatacg

SEQ ID NO: 885792 - DNA, 75 bp, synthetic construct
  source 1..75: mol_type = other DNA
agtcagaaatatacgcgcgacagggcgtggagctgagccgtaataccatggtgcgctgggtatcagaaatggcag

SEQ ID NO: 885793 - DNA, 75 bp, synthetic construct
  source 1..75: mol_type = other DNA
aggcgaatgtgattcgccgacgtgaagaaacggcagcgacgcgctcgttactgaacaccgccaaagtcatggaga

SEQ ID NO: 885794 - DNA, 75 bp, synthetic construct
  source 1..75: mol_type = other DNA
tatttagtgataaccgactgtggtgctattgaaggttttagcttatggcaaaaacatctttgtaatctaggtaaa

SEQ ID NO: 885795 - DNA, 75 bp, synthetic construct
  source 1..75: mol_type = other DNA
gaagccattgccgaagccggatttaccgccactgcaagggcatgtgaggcacatccgctgctcctcgcactggaa

SEQ ID NO: 885796 - DNA, 75 bp, synthetic construct
  source 1..75: mol_type = other DNA
gacgccttgtgtcactggcctcttctctcgctcagcatgcaggtctttctatcgtgaaatcatcccagtccactg

SEQ ID NO: 885797 - DNA, 75 bp, synthetic construct
  source 1..75: mol_type = other DNA
ctgcggtgctatctgaactaaaacgagaaaaaaaatcggaaattgaaaagaaatttccttttctcagtgagtcag

SEQ ID NO: 885798 - DNA, 75 bp, synthetic construct
  source 1..75: mol_type = other DNA
ttttatcacatcacatgagaatcgttttttgtcgaaatgggaaagttattgatacagaaaaagagttattaagaa

SEQ ID NO: 885799 - DNA, 75 bp, synthetic construct
  source 1..75: mol_type = other DNA
taagccactttattatttcctgttttacaatacataccgtaataaaaatgaataataaaataattcgttacataa

SEQ ID NO: 885800 - DNA, 75 bp, synthetic construct
  source 1..75: mol_type = other DNA
atatttggaagtggtaatgttacaagtgatgacataaggaatattgataacattatcaaaaattctccctcacca

SEQ ID NO: 885801 - DNA, 75 bp, synthetic construct
  source 1..75: mol_type = other DNA
aagaaagagaacggtaaatcggcactggtaaaccagatgaccggcctctacaactccattaaaggagagaaataa

SEQ ID NO: 885802 - DNA, 75 bp, synthetic construct
  source 1..75: mol_type = other DNA
ttatatcaacgaagagctgacttttgtgtgcctgtttgcattattgatgaaccgtatcttgatataattgagcat

SEQ ID NO: 885803 - DNA, 75 bp, synthetic construct
  source 1..75: mol_type = other DNA
aataaaatatcttcgctgtccgggagaggaaataaaaaatataattctttcagttgacaaaaaaacctggaattt

SEQ ID NO: 885804 - DNA, 75 bp, synthetic construct
  source 1..75: mol_type = other DNA
tttataggacgtccgtctgagttcaggatgctggataatgtactgaaaaaatataaggaagataacagtcgacag

SEQ ID NO: 885805 - DNA, 75 bp, synthetic construct
  source 1..75: mol_type = other DNA
cgcgacctgttgttaaggacttctgtgtcatgctggttgatattaatcagttcaaacgcatcaatgcccaatggg

SEQ ID NO: 885806 - DNA, 75 bp, synthetic construct
  source 1..75: mol_type = other DNA
gactgcttccgaagaggaagaggacaaaaaggccaaaaaagcgaaaggccgtcgcgcggaagaggatgagcgcga

SEQ ID NO: 885807 - DNA, 75 bp, synthetic construct
  source 1..75: mol_type = other DNA
cgagttaagcaatttgatggaatatctggttaacgtagttccttcaggtgaagttatcgacagcacgctattgcc

SEQ ID NO: 885808 - DNA, 75 bp, synthetic construct
  source 1..75: mol_type = other DNA
gatattgaactattggtgcattactttttacatctgcatacccgtcgtctgggatcggtttatcctggcattgct

SEQ ID NO: 885809 - DNA, 75 bp, synthetic construct
  source 1..75: mol_type = other DNA
tttttatcttaattatttttccagacatatggtgacggaaagaaatattctgaccatatttgctatccatacctt

SEQ ID NO: 885810 - DNA, 75 bp, synthetic construct
  source 1..75: mol_type = other DNA
caggtcaccagcgttttttcgataacaatgatgacgaagagctgatggaagagaaacgctatgatgaaatcatca

SEQ ID NO: 885811 - DNA, 75 bp, synthetic construct
  source 1..75: mol_type = other DNA
tgaggcacgtgaaattctaccgattggtgccagtagcccaatacaagtcgacattcgcatcatttctgcaactaa

SEQ ID NO: 885812 - DNA, 75 bp, synthetic construct
  source 1..75: mol_type = other DNA
tcagtgaggcgcacctgtcactcgatgatgcgggcggcacggcgctggaggagatggaaaagcaaatgatccgcg

SEQ ID NO: 885813 - DNA, 75 bp, synthetic construct
  source 1..75: mol_type = other DNA
ggcaaaaatacttcgcaggtgaacaactctggcacggttaataaactggtgcagaaagcgggcgtctttaacaac

SEQ ID NO: 885814 - DNA, 75 bp, synthetic construct
  source 1..75: mol_type = other DNA
ttgatagcctgattacgaaagatcgtatgcgtgtcgatgtagtagtcgctttctttgtacgggtaaaaccgtctg

SEQ ID NO: 885815 - DNA, 75 bp, synthetic construct
  source 1..75: mol_type = other DNA
atataaatttagataacttcgtagagtcaggtgcagatctttattattacgtcaaaaaactggcaaataaactaa

SEQ ID NO: 885816 - DNA, 75 bp, synthetic construct
  source 1..75: mol_type = other DNA
tacatgcattcagaaacgctctggtaatggctgccgacactcattcacatgcctgttttgatatgccaagatggg

SEQ ID NO: 885817 - DNA, 75 bp, synthetic construct
  source 1..75: mol_type = other DNA
atgctgtacacctttatctcatttattgctctgtttaccgtctgcctgcatcccacattttatgtggtgataata

SEQ ID NO: 885818 - DNA, 75 bp, synthetic construct
  source 1..75: mol_type = other DNA
aaaacaccatcatacactaaatcagtaagttggcagcatcaccacgctaaaggtaaagctacagggatctattac

SEQ ID NO: 885819 - DNA, 75 bp, synthetic construct
  source 1..75: mol_type = other DNA
tgcaacagctgcacaaatgaccatgcatgagttacaggatacccgcgagaacttcgtgcagggagtacaaaatac

SEQ ID NO: 885820 - DNA, 75 bp, synthetic construct
  source 1..75: mol_type = other DNA
aggatgttaatggtaacagtctgacgtttcatcagttgaaggcggcagattatggcgccgtgctggcgaataacg

SEQ ID NO: 885821 - DNA, 75 bp, synthetic construct
  source 1..75: mol_type = other DNA
attgccagcgatccgctggtggctaaaaatcttatggtgcttctcaatcgcggcggaatctattctatggtcagt

SEQ ID NO: 885822 - DNA, 75 bp, synthetic construct
  source 1..75: mol_type = other DNA
ataccataaatacgggtatcaaagtgactaaaatggatttacttttcggggggcttaacacgtttattgccgcct

SEQ ID NO: 885823 - DNA, 75 bp, synthetic construct
  source 1..75: mol_type = other DNA
caaaagactcatagtattgatgagatgaggtattattatgcgacagcggataagtctggtttctttgaatttaca

SEQ ID NO: 885824 - DNA, 75 bp, synthetic construct
  source 1..75: mol_type = other DNA
gacataacacactggacctgtcttccctgtttgaccagactgtcacactgaaaaatgacctgactctggtttctg

SEQ ID NO: 885825 - DNA, 75 bp, synthetic construct
  source 1..75: mol_type = other DNA
cacggaccagagcagcaacgccacttgggagtttgtggggcacagtcagggggatgcacagaaactggtagctga

SEQ ID NO: 885826 - DNA, 75 bp, synthetic construct
  source 1..75: mol_type = other DNA
atgccttctcatatcaaatcctcaatgctgggaacatcgcttgtattgccggtgcataaagggcgtattcagacc

SEQ ID NO: 885827 - DNA, 75 bp, synthetic construct
  source 1..75: mol_type = other DNA
caacgggcgaagagagcggcaccaacagcctcaacggctacgttgtgggaaccaacgctgatggtagcgccggta

SEQ ID NO: 885828 - DNA, 75 bp, synthetic construct
  source 1..75: mol_type = other DNA
catgaggccgccggagacgttcttaaacgtgctgaggctgctacggttagtgctgaagaggccaggcgtatggca

SEQ ID NO: 885829 - DNA, 75 bp, synthetic construct
  source 1..75: mol_type = other DNA
gatgcaggacctaaaggtgaccccggcccagccggtcccgcaggtgaaaaaggtgagccgggagaacgagggcct

SEQ ID NO: 885830 - DNA, 75 bp, synthetic construct
  source 1..75: mol_type = other DNA
atggtgctgctacttaataacgatgtctggtgtaagagtcgtgaggtggtggttctcagaaatctgattgagcag

SEQ ID NO: 885831 - DNA, 75 bp, synthetic construct
  source 1..75: mol_type = other DNA
aaaacgtctgcgtcttaactacaacggcataattgcactgttagtagaaggctttaaagcacttcgtcatgagat

SEQ ID NO: 885832 - DNA, 75 bp, synthetic construct
  source 1..75: mol_type = other DNA
atgcacgggggccccgggggcctcagggagaaactggtccgaagggggatgtcggtcctaaaggcgaaacaggtc

SEQ ID NO: 885833 - DNA, 75 bp, synthetic construct
  source 1..75: mol_type = other DNA
tcagtttagtgcctggctggggttaacaccaagacaacaaagctccgggggtaaagcacggttggggagaattga

SEQ ID NO: 885834 - DNA, 75 bp, synthetic construct
  source 1..75: mol_type = other DNA
ggttatagctttagtcggttgttgctggaggagcgaatgcgtgttgctgttaatcttgtatgtttccagcgagag

SEQ ID NO: 885835 - DNA, 75 bp, synthetic construct
  source 1..75: mol_type = other DNA
tgattcgctatccgatagatatttttcttgaaaaagaaaaagtttcactcgatgccggaagtgttatgcttgttg

SEQ ID NO: 885836 - DNA, 75 bp, synthetic construct
  source 1..75: mol_type = other DNA
taaatgtttttaactttgataatgtcgacgcttcaaaatataaacatctggatggatgcctcttaagtgcagcac

SEQ ID NO: 885837 - DNA, 75 bp, synthetic construct
  source 1..75: mol_type = other DNA
gagcctgagcctggagtatgggatcgcccgtctggatggtaacggttctgacacggcaggggacaacggcgtaac

SEQ ID NO: 885838 - DNA, 75 bp, synthetic construct
  source 1..75: mol_type = other DNA
ttttatcccgactctggatgataatggcaatatcaccagcgaagcctattggcagacgaatactccgtatctaat

SEQ ID NO: 885839 - DNA, 75 bp, synthetic construct
  source 1..75: mol_type = other DNA
gcagcagaggagtctggtaagttcagaacagaagttctcgaggcggctcttgctcactcgaagaaagatgagatc

SEQ ID NO: 885840 - DNA, 75 bp, synthetic construct
  source 1..75: mol_type = other DNA
tgttaatgacctgccgccagcaggcggaacagctgcgccgcctgtcaggtctggcagaacgtcgggagtctgggg

SEQ ID NO: 885841 - DNA, 75 bp, synthetic construct
  source 1..75: mol_type = other DNA
aaacattaccagatttaccgcctcagataacaacactggaaataagaaaaaacctattaacacatctccctgatt

SEQ ID NO: 885842 - DNA, 75 bp, synthetic construct
  source 1..75: mol_type = other DNA
gcgacaaaacagcggacaatgatggggctaggtgctttccccgccctttcacttgctgacgcccgagggttaaga

SEQ ID NO: 885843 - DNA, 75 bp, synthetic construct
  source 1..75: mol_type = other DNA
tgcgagtacagcaatgaatgaagccggtttcaacgcggacgccattgaagctgctttagcccatgttgataaaaa

SEQ ID NO: 885844 - DNA, 75 bp, synthetic construct
  source 1..75: mol_type = other DNA
caatgaatagccaaactgctaatgcagctttaaaacgtattggttttggaggaaagctagttgctcatggcctcc

SEQ ID NO: 885845 - DNA, 75 bp, synthetic construct
  source 1..75: mol_type = other DNA
aacaggactatgaagctgcgttacgcgccgtagagcctatgtttgataacgaacctcctgccgataccccggagg

SEQ ID NO: 885846 - DNA, 75 bp, synthetic construct
  source 1..75: mol_type = other DNA
tccgtccccacaaataatgcagtttcacctgaagcaacaggactccccgttgtttgccgccatccacaaaccgga

SEQ ID NO: 885847 - DNA, 75 bp, synthetic construct
  source 1..75: mol_type = other DNA
aagcccccgatgaactgataccagccatcgcctctgccgataaggacaatcgtcagttgaatcttctgctggtcc

SEQ ID NO: 885848 - DNA, 75 bp, synthetic construct
  source 1..75: mol_type = other DNA
tcgaactgctatctcgtttacatgttatatgctatgtaacgaatacggaatgttcgccaatgatagcgttggaat

SEQ ID NO: 885849 - DNA, 75 bp, synthetic construct
  source 1..75: mol_type = other DNA
aaattatttctccgtcctgcaaacttacaggaactttccgccgaggcaccggatttactccagttttctcgttct

SEQ ID NO: 885850 - DNA, 75 bp, synthetic construct
  source 1..75: mol_type = other DNA
gcgatttctttgaagtaatgtgcctgctcattgaagagtacgagaaaaagcattacccaattgagccaccatcac

SEQ ID NO: 885851 - DNA, 75 bp, synthetic construct
  source 1..75: mol_type = other DNA
gcaacaaagcagcggacaatgatggggctaggtaccttcccagctctttcacttgctgacgcccgacggttaaga

SEQ ID NO: 885852 - DNA, 75 bp, synthetic construct
  source 1..75: mol_type = other DNA
aatatcgcaccggggatcgcgggccgactttacgtccttgaccgggagccgtggcagatgcgctgcgtcgcgcaa

SEQ ID NO: 885853 - DNA, 75 bp, synthetic construct
  source 1..75: mol_type = other DNA
gttatctcacggctcaatgaaatcttccgcttcgccatctccgaagagcttatcgagtttaacccagcagacaac

SEQ ID NO: 885854 - DNA, 75 bp, synthetic construct
  source 1..75: mol_type = other DNA
gctcgctggagatgcacgtcttcccttctctgggcagtacgcccgtcaccgagatccgcccgaagatgctcaagg

SEQ ID NO: 885855 - DNA, 75 bp, synthetic construct
  source 1..75: mol_type = other DNA
tcacctttcgcaagatgtcggtctttatgatgtttatgaccaaggggaatattgccagaaccgccgaagctatga

SEQ ID NO: 885856 - DNA, 75 bp, synthetic construct
  source 1..75: mol_type = other DNA
agcgtctggaaagagaacgcgatgccgactgggccatccgcgaactgctggcgcgcatgacccagcggctgcagg

SEQ ID NO: 885857 - DNA, 75 bp, synthetic construct
  source 1..75: mol_type = other DNA
ggaaaagttgcaggataacggcgcatcggatgaagaactggccctgctgcatgaagggataaagatcgtcgatga

SEQ ID NO: 885858 - DNA, 75 bp, synthetic construct
  source 1..75: mol_type = other DNA
tgaagttgcagaggagcagcagaaaatcgtgcttaacagtattttttcagcggtcgcctctaactggttcttgct

SEQ ID NO: 885859 - DNA, 75 bp, synthetic construct
  source 1..75: mol_type = other DNA
tgaagttgcagaggaacagcagcaaatcgctctgaacagtattttttcgacggtcgccgctaactggttccagct

SEQ ID NO: 885860 - DNA, 75 bp, synthetic construct
  source 1..75: mol_type = other DNA
agaactaccaaatctaatgcgttctttagccatgtctaatttatctgtatcgactcgctgccttatcgaatggca

SEQ ID NO: 885861 - DNA, 75 bp, synthetic construct
  source 1..75: mol_type = other DNA
cagcatcgccagaacggcgggcgcaggtcattttccccgtgaagttctggaatctgcactggcacaccagaaaga

SEQ ID NO: 885862 - DNA, 75 bp, synthetic construct
  source 1..75: mol_type = other DNA
gtggcacggacaacacgtccccttaccaacaccgaagttctgcgcgctaaagcgttagagaaggatctgacgctg

SEQ ID NO: 885863 - DNA, 75 bp, synthetic construct
  source 1..75: mol_type = other DNA
gacgattccagccgaacggatgaaggcgaaacgcaagcatattgtcccactgtcttctcaggcattagagattct

SEQ ID NO: 885864 - DNA, 75 bp, synthetic construct
  source 1..75: mol_type = other DNA
accggaatgcttgatgaagcacagaccaccaactacagcctgaacgtcatgcgcgatcaacaatataagcagacg

SEQ ID NO: 885865 - DNA, 75 bp, synthetic construct
  source 1..75: mol_type = other DNA
tcaaccgccgcctggtggcaaaaatgttgtctgagctggagtatgagcaggttttccacgcggaatctcagggcg

SEQ ID NO: 885866 - DNA, 75 bp, synthetic construct
  source 1..75: mol_type = other DNA
gagcataaatatgctctgctatgggatgtacaaaattattatgtttcacgtatgtttattaccttgtatggtgcc

SEQ ID NO: 885867 - DNA, 75 bp, synthetic construct
  source 1..75: mol_type = other DNA
acacccaattgaaatttatcttttaaaaaagggatttatatcattaacttatctctatcgaaaggaacccaagcg

SEQ ID NO: 885868 - DNA, 75 bp, synthetic construct
  source 1..75: mol_type = other DNA
gtattgtgtatcaaggcaaagctctcgacgatcataagatggatattctttcgtttgcgaaaagtttgcaggggc

SEQ ID NO: 885869 - DNA, 75 bp, synthetic construct
  source 1..75: mol_type = other DNA
gaaccctgtatgggaggttatgcccggtagttattataaaatgggtcaaaactgggacgattatgatcatctgac

SEQ ID NO: 885870 - DNA, 75 bp, synthetic construct
  source 1..75: mol_type = other DNA
ctttgcaccagagcccggtaacctccacctccacctccacctcaacttcgcctcagtcatgctggagctggtatc

SEQ ID NO: 885871 - DNA, 75 bp, synthetic construct
  source 1..75: mol_type = other DNA
gttgaaagctggggcggaaatgcgttttatcacgcagggatttggggtacgggaagatcataactggcaggctga

SEQ ID NO: 885872 - DNA, 75 bp, synthetic construct
  source 1..75: mol_type = other DNA
atttcagcctgacagcagagggggaggatatcacgaaggccataaagcgggggctggctgaactgcgttataccg

SEQ ID NO: 885873 - DNA, 75 bp, synthetic construct
  source 1..75: mol_type = other DNA
taccggaggcagggatgcccctgtgatgaccatcacaccggatatggtgtcagactgggattaccgggagggcga

SEQ ID NO: 885874 - DNA, 75 bp, synthetic construct
  source 1..75: mol_type = other DNA
tcctccttgtgcatgttatttcaaagttagatggcacattgggaaaattgaaaatgctattaaccttaaaaaaat

SEQ ID NO: 885875 - DNA, 75 bp, synthetic construct
  source 1..75: mol_type = other DNA
ggaaagatagatcctgaggcgattttcatgggggcaaccaatctccatgaaagcattagctcttctaccacagaa

SEQ ID NO: 885876 - DNA, 75 bp, synthetic construct
  source 1..75: mol_type = other DNA
cgtgtgcagaaagccggacgccagatgacgataacgttgccctgcagaccggaactgctgaaagcgggggcggag

SEQ ID NO: 885877 - DNA, 75 bp, synthetic construct
  source 1..75: mol_type = other DNA
tcaaccataaaaaatgccagcccgaaggctggcatttttaaatcagataaagtcagacttatgcctggcctttga

SEQ ID NO: 885878 - DNA, 75 bp, synthetic construct
  source 1..75: mol_type = other DNA
taggtgtcgctggcattgtaacgtctgacaatgtaacagctaaaaaagcttttgctatcgagttgaatgggttaa

SEQ ID NO: 885879 - DNA, 75 bp, synthetic construct
  source 1..75: mol_type = other DNA
aaaccggaatacagcacgctctcctggctgtttatgtttatttgtgccggtttaggttcttctacgctttattga

SEQ ID NO: 885880 - DNA, 75 bp, synthetic construct
  source 1..75: mol_type = other DNA
cagatggacaaaaaacattaactgcagagaggattctaggaacttgcacagcaactgtgaactcaattactttag

SEQ ID NO: 885881 - DNA, 75 bp, synthetic construct
  source 1..75: mol_type = other DNA
atatgcagacggtaacgtccctttcattctcattcccacttggcggcaatggacctcgtgtaccaagtcttagca

SEQ ID NO: 885882 - DNA, 75 bp, synthetic construct
  source 1..75: mol_type = other DNA
ggcggctataaagacaattctaatgatatgcagacggtaacgtccctttcattctcattcccacttggcggcaat

SEQ ID NO: 885883 - DNA, 75 bp, synthetic construct
  source 1..75: mol_type = other DNA
gtgaaggcgctaacgatagctgccaattgccctttgatatcagcgggaaggacagcaatagccctatcatccgcc

SEQ ID NO: 885884 - DNA, 75 bp, synthetic construct
  source 1..75: mol_type = other DNA
aatgtaggggaagaaaaagcatggctcgcacaagtatgggttgaggatgaaaatgggaagaaaactgactccatc

SEQ ID NO: 885885 - DNA, 75 bp, synthetic construct
  source 1..75: mol_type = other DNA
tgctgatgatttctggaaaagctgtcatctggaacaagcattgagtacgttgataaataataagtcggattttgt

SEQ ID NO: 885886 - DNA, 75 bp, synthetic construct
  source 1..75: mol_type = other DNA
aggatctggcctgtaaatgttcctgccccagccgtaaattcccctgtaaacatagccttgcgttgcttttgctcc

SEQ ID NO: 885887 - DNA, 75 bp, synthetic construct
  source 1..75: mol_type = other DNA
ctattggcggtgctttaacttcgaatggtgctcaagttaaaaaaggttttgctatcgaacttaatggattaagcc

SEQ ID NO: 885888 - DNA, 75 bp, synthetic construct
  source 1..75: mol_type = other DNA
agaaatttaaagaagaggcgagaaaaaaaatcgccaaataccatgaattacgtaaacaacgtggtatgagcctgc

SEQ ID NO: 885889 - DNA, 75 bp, synthetic construct
  source 1..75: mol_type = other DNA
acaatggacaaacaaccttgactgcagacaaaattctaagtacctgtactgctcaggtaaactcaattactttag

SEQ ID NO: 885890 - DNA, 75 bp, synthetic construct
  source 1..75: mol_type = other DNA
caacggggaaagactgagagaacctaacgaagtttttaaacgtttaggtcgagcaataagatataattttcaagt

SEQ ID NO: 885891 - DNA, 75 bp, synthetic construct
  source 1..75: mol_type = other DNA
ttgtaattattgatactcctccaattttagctgtgactgatgctgcaattattggtcgttatgctgggacaactc

SEQ ID NO: 885892 - DNA, 75 bp, synthetic construct
  source 1..75: mol_type = other DNA
taacactgtcaaagaacttgctgttagtgtttcaagatttgagcagagtggaattgtagttaaaggttgtatatt

SEQ ID NO: 885893 - DNA, 75 bp, synthetic construct
  source 1..75: mol_type = other DNA
cagtcaagatcctctgactggctcggtgaccacgacctggaatcaagtgctagaaattgaaggtgctgtggtggc

SEQ ID NO: 885894 - DNA, 75 bp, synthetic construct
  source 1..75: mol_type = other DNA
aaagcagaaattgcaaaatcaagatctaaatacaaattaagtgatattttaattcgtgtagaaaaaaatagcctt

SEQ ID NO: 885895 - DNA, 75 bp, synthetic construct
  source 1..75: mol_type = other DNA
atttattcatgccatcgcaagaagtttcttcttgcgacaactttcatttatttaaggctgaatatcgtattttag

SEQ ID NO: 885896 - DNA, 75 bp, synthetic construct
  source 1..75: mol_type = other DNA
aaacgttttgaacaaagtggagtcatggtgaaaggatgtattttaaatggtgtcgttagaaaagctagtagctat

SEQ ID NO: 885897 - DNA, 75 bp, synthetic construct
  source 1..75: mol_type = other DNA
ggctttgatggaaaaaagacaaactttacaagaagaaaaaaataagcttagcaaacgagtaagcagtatgccagc

SEQ ID NO: 885898 - DNA, 75 bp, synthetic construct
  source 1..75: mol_type = other DNA
tccagtttcggagtggttaacgcagaagcattttaaaaatggaaaacgattggctgcaaaagatgtgttcaaaga

SEQ ID NO: 885899 - DNA, 75 bp, synthetic construct
  source 1..75: mol_type = other DNA
aagcagcacaagatgaaaaaagcttggattttttaaataagcagttaccaaaagttcgcggtgatcttgacctag

SEQ ID NO: 885900 - DNA, 75 bp, synthetic construct
  source 1..75: mol_type = other DNA
tggagtgattaaaaaagcaagcagctattatggttatggctataattattatggttattcttatgatgataagaa

SEQ ID NO: 885901 - DNA, 75 bp, synthetic construct
  source 1..75: mol_type = other DNA
acacccatttatcaagccgatgcgacattgcaggtagaacagaagcaggcaaatagcattcttaacagtttaagt

SEQ ID NO: 885902 - DNA, 75 bp, synthetic construct
  source 1..75: mol_type = other DNA
tttaaggatctcgaagataacgttgaaaaaagacttcaaaatcgccaggcgaaatatcaaaatgaaattaatcaa

SEQ ID NO: 885903 - DNA, 75 bp, synthetic construct
  source 1..75: mol_type = other DNA
agcgcaggttacctggatggggatcaaagcggataaacatcgcgaaagcaatggcactcgagtcagcagtgaagg

SEQ ID NO: 885904 - DNA, 75 bp, synthetic construct
  source 1..75: mol_type = other DNA
aggatggagcccgaaatattgctgagataaaaaccggggtggaaggacagctaaatgccaacctgaatgtctggg

SEQ ID NO: 885905 - DNA, 75 bp, synthetic construct
  source 1..75: mol_type = other DNA
gccgatctcagtgcgcagattaccggcagcggcgatctggcgttcagtagtcagaaaggtcagaccgtatcgcta

SEQ ID NO: 885906 - DNA, 75 bp, synthetic construct
  source 1..75: mol_type = other DNA
tttaatttgttttccccagcacttaagcttaatactggcctggcaattctttcgcctggtgcatttgaagttcac

SEQ ID NO: 885907 - DNA, 75 bp, synthetic construct
  source 1..75: mol_type = other DNA
ggcaaggctggtgctgacgaaggacggacaaatttttctcaacggcacaaaaattcatttgcagggtaaggagca

SEQ ID NO: 885908 - DNA, 75 bp, synthetic construct
  source 1..75: mol_type = other DNA
agcgggtttaatgaactgaagtttgacgatgcgacagggaaagaacaggtctacatccacgcgcagaagaacatg

SEQ ID NO: 885909 - DNA, 75 bp, synthetic construct
  source 1..75: mol_type = other DNA
cgtttgccttcaacgtggggacgggcaatgcctgcagttccacgctggtgaagttactcaatcagcggcgctggg

SEQ ID NO: 885910 - DNA, 75 bp, synthetic construct
  source 1..75: mol_type = other DNA
atggcaaaatttcacggggggaatatgaatccttcaatcgttaagcgctgccttgtcggggctgtgctggctgtc

SEQ ID NO: 885911 - DNA, 75 bp, synthetic construct
  source 1..75: mol_type = other DNA
ctgttcttcagtgcatggatcatgctggaaccagtcatatttgaatgtatgagaacgccgcccgtgcctgctggc

SEQ ID NO: 885912 - DNA, 75 bp, synthetic construct
  source 1..75: mol_type = other DNA
gcagcagaagggctgatctccaacatgctgcgtgtggagcgggcactggaaaggtgtgtgaagcaacagccacca

SEQ ID NO: 885913 - DNA, 75 bp, synthetic construct
  source 1..75: mol_type = other DNA
ccgttgcgacgaataacggcactgttttacttgaacaatatgattactcatccgaaatcgatgtatcgccggaat

SEQ ID NO: 885914 - DNA, 75 bp, synthetic construct
  source 1..75: mol_type = other DNA
gccttgtcgggaccgtgctggctattgctgccactctgccgggttttcagcagcttcacacctccgtagaggggg

SEQ ID NO: 885915 - DNA, 75 bp, synthetic construct
  source 1..75: mol_type = other DNA
tgcagttgctaaatagacagcaagaattaaatatttccaaatccagtacaattgggaatgttaggatcgttgatt

SEQ ID NO: 885916 - DNA, 75 bp, synthetic construct
  source 1..75: mol_type = other DNA
gctacgccaatctatcaagccaatgcgttaatccaagtagagcaaaaacaagggaacgcgattctaagcagttta

SEQ ID NO: 885917 - DNA, 75 bp, synthetic construct
  source 1..75: mol_type = other DNA
tttaaagcatgttaaagaagggggctttgattatattggacgtggtgcggttccgcctaatcctgcagaattgtt

SEQ ID NO: 885918 - DNA, 75 bp, synthetic construct
  source 1..75: mol_type = other DNA
ggcaagcctttaaataacaacaatattcagttattgatttctggaattgaagcagaacctggttctgtatttgac

SEQ ID NO: 885919 - DNA, 75 bp, synthetic construct
  source 1..75: mol_type = other DNA
tatatatgcaattacttaataggcaacaagagttaagtatttctaaatcaagcgctattggcaacgtccgtataa

SEQ ID NO: 885920 - DNA, 75 bp, synthetic construct
  source 1..75: mol_type = other DNA
gacaagctgcgcaagatgctaagagcctggagtttttgaatcaacaattgccaaaagttaggaatgatcttgata

SEQ ID NO: 885921 - DNA, 75 bp, synthetic construct
  source 1..75: mol_type = other DNA
agtatgaaacgattcgaacaaagtggtgttcatataaaaggatgtatactcaatggagttgtgaaaaaagcaagt

SEQ ID NO: 885922 - DNA, 75 bp, synthetic construct
  source 1..75: mol_type = other DNA
aattcaggaaagaaagttttatatattgatgccgacatgcgtaaagggtacgtgcataaggtattcggcatgtca

SEQ ID NO: 885923 - DNA, 75 bp, synthetic construct
  source 1..75: mol_type = other DNA
acttgaaaaaagaaaaaccttacaagatgaaaagttaaagcttaataaaaaagtgtcagccatgccggcaacaca

SEQ ID NO: 885924 - DNA, 75 bp, synthetic construct
  source 1..75: mol_type = other DNA
acgagaaggatgtgcaggtattgaagctggcggagccgtaccagatgcgccagctgatctcgattgtttattctc

SEQ ID NO: 885925 - DNA, 75 bp, synthetic construct
  source 1..75: mol_type = other DNA
gggatcttaattggtatattgtccggtgcgttcttatcagttgcattaataattcttaaaatctcattgcgccga

SEQ ID NO: 885926 - DNA, 75 bp, synthetic construct
  source 1..75: mol_type = other DNA
gtaagtatacgtcggcttgaacaaagtaatgtaaaagttaaaggatgtgtactaaatggagttgtaagaagagca

SEQ ID NO: 885927 - DNA, 75 bp, synthetic construct
  source 1..75: mol_type = other DNA
gctacttgagaaacgaaataccttagaaaaagaaaaagggcgtttgaacaaacaggtttcagcaatgccatctac

SEQ ID NO: 885928 - DNA, 75 bp, synthetic construct
  source 1..75: mol_type = other DNA
atagaggtaagtattaagagatttgaaaatactggcattcaagtaaaaggttgcatattgaacggcgttgtgaag

SEQ ID NO: 885929 - DNA, 75 bp, synthetic construct
  source 1..75: mol_type = other DNA
gggaagcttactcaaaaaaatggcgtagttattgatatcgccaatatatcggctaaaccaggagataagttttat

SEQ ID NO: 885930 - DNA, 75 bp, synthetic construct
  source 1..75: mol_type = other DNA
gaaattgaaattagtgttaagagatttgagcacagcggtgttagcgttaaaggttgtatactcaatggtgttgtg

SEQ ID NO: 885931 - DNA, 75 bp, synthetic construct
  source 1..75: mol_type = other DNA
ttaatatttctaggttatatttaccggtaactgatgatgataatcctgaaataaaacttatcgtcaaagatgata

SEQ ID NO: 885932 - DNA, 75 bp, synthetic construct
  source 1..75: mol_type = other DNA
attgcaatctcgaatggtattaggtaaaactgttgatgacctgaatttagaaatagcaattgaaaaagattattt

SEQ ID NO: 885933 - DNA, 75 bp, synthetic construct
  source 1..75: mol_type = other DNA
tgcttgctaatggcattgatccccaagttcataacaacgataaagctaatgccttaaagaatgctactgaacaca

SEQ ID NO: 885934 - DNA, 75 bp, synthetic construct
  source 1..75: mol_type = other DNA
tcttaatcatatgcatgaacaaacagccaacgcagctatcatccgaatggggttcggaggcgagcttgtagctca

SEQ ID NO: 885935 - DNA, 75 bp, synthetic construct
  source 1..75: mol_type = other DNA
attgaagttagttttaagcgttttgaacagagcggtgtcattgttaaaggttgtatactaaatggtgtagtgaaa

SEQ ID NO: 885936 - DNA, 75 bp, synthetic construct
  source 1..75: mol_type = other DNA
ggaattttacttggtttgatggtttctagcggcattgtattacttcgtgtatttttgcggagaggcattgaaact

SEQ ID NO: 885937 - DNA, 75 bp, synthetic construct
  source 1..75: mol_type = other DNA
ttcgtgggctacgaactagtctccattttgcaatgatggaggcaagaaataatatcctaatgatttctggtgcaa

SEQ ID NO: 885938 - DNA, 75 bp, synthetic construct
  source 1..75: mol_type = other DNA
tatatatgcaactgctcaatcggcaacaggagttgagcattgctaaatctagcgcaatcggtaacgtacgaatta

SEQ ID NO: 885939 - DNA, 75 bp, synthetic construct
  source 1..75: mol_type = other DNA
acaatcaagaatgattttgggcaaaacagttgatgatttaaatttacaaacacgaattgagccactttatttccc

SEQ ID NO: 885940 - DNA, 75 bp, synthetic construct
  source 1..75: mol_type = other DNA
agttggttattattgacacaccaccaatccttgctgttacagatgctgcaataataggaaagtatgctggaacaa

SEQ ID NO: 885941 - DNA, 75 bp, synthetic construct
  source 1..75: mol_type = other DNA
accgcgacgaattcatcatgatccgcaagatgaagaacgttaactggctggatgatgaaggtcgcgatcaggtac

SEQ ID NO: 885942 - DNA, 75 bp, synthetic construct
  source 1..75: mol_type = other DNA
cctgttgttgacgattaatcagcagaccggcaccacatttgttatttccacgcactccagcgaattaaaagcgcg

SEQ ID NO: 885943 - DNA, 75 bp, synthetic construct
  source 1..75: mol_type = other DNA
cgatcagagcgcattcttctggaatctggataacggggtcatcaacttcgaccacgacagtaccagcgccgtgaa

SEQ ID NO: 885944 - DNA, 75 bp, synthetic construct
  source 1..75: mol_type = other DNA
gggctaccagacccgctatgaatacgaccgctttggccagatgacggcggttcaccgcgaggaaggtatcagcct

SEQ ID NO: 885945 - DNA, 75 bp, synthetic construct
  source 1..75: mol_type = other DNA
ctacgaatcccggctggcaaaactcgatctgaaccatgacgagctggaaacgctctctgatcaggtcgatgaact

SEQ ID NO: 885946 - DNA, 75 bp, synthetic construct
  source 1..75: mol_type = other DNA
tgtgtttctgcgcccggtaatgctggagcagctgcaaaccatcaacccccatctccctgtttccgtgctggaaga

SEQ ID NO: 885947 - DNA, 75 bp, synthetic construct
  source 1..75: mol_type = other DNA
ggtcagggctacaaattaaaccctgatgagccattaccattagtatcactggatgaacccagtacttataggaat

SEQ ID NO: 885948 - DNA, 75 bp, synthetic construct
  source 1..75: mol_type = other DNA
atcagttatcgccgcgattaaatcgcttgaatacgggcgaactattaaagatatctgccggggggcgggcttatc

SEQ ID NO: 885949 - DNA, 75 bp, synthetic construct
  source 1..75: mol_type = other DNA
ggaaatggagtccaggatgtcggcacaggatatggcttatgatatctatccggatgatgaaacagatacccatca

SEQ ID NO: 885950 - DNA, 75 bp, synthetic construct
  source 1..75: mol_type = other DNA
taatccatagtcggcaccagaaacaaccaaagccgatgagtaaagacaacctgagcgactactttgccaaagcac

SEQ ID NO: 885951 - DNA, 75 bp, synthetic construct
  source 1..75: mol_type = other DNA
gcgacattgccccggcccccgctgctgctccagagcagcgagaaaattctgaatcagatgaaaaatttaatcatc

SEQ ID NO: 885952 - DNA, 75 bp, synthetic construct
  source 1..75: mol_type = other DNA
atcagcgcagtgatggtcggtttgttaaacagcggtgaccatattttattagttaatcaaatcgtaagcgtcaac

SEQ ID NO: 885953 - DNA, 75 bp, synthetic construct
  source 1..75: mol_type = other DNA
gcattaatgagctggtagagcttcatcgttctgatgagtacttacagttaagagttgttattaaagatgactacg

SEQ ID NO: 885954 - DNA, 75 bp, synthetic construct
  source 1..75: mol_type = other DNA
gacagtcgatgcccgagaagccttcgctattctgctggaaaaaatggatgtcattcatgggatgtttgcccgttc

SEQ ID NO: 885955 - DNA, 75 bp, synthetic construct
  source 1..75: mol_type = other DNA
cgaatgttccatcaccagattgaacgtggcaacccgcgacggacatttacagggatggcttttatcgaaggataa

SEQ ID NO: 885956 - DNA, 75 bp, synthetic construct
  source 1..75: mol_type = other DNA
atctcaaataaatgtcctgctaatccgaaaaaaacgcttatgcttagagacccctaaaagaccgattgggtttgc

SEQ ID NO: 885957 - DNA, 75 bp, synthetic construct
  source 1..75: mol_type = other DNA
attttttatttttctcagcatagtgaattagatgaaacaataattaaatttatagatagcgaaaaatctattaca

SEQ ID NO: 885958 - DNA, 75 bp, synthetic construct
  source 1..75: mol_type = other DNA
agttgctgtaaacacagaacctgataatatgtcaatcttgctgaacagggtagggtatttttgtgaactgtttca

SEQ ID NO: 885959 - DNA, 75 bp, synthetic construct
  source 1..75: mol_type = other DNA
tggtgtcggacaatcaggatttaggttttattgtcgccgatcagaacgatacgccgattacgcctaacgatctca

SEQ ID NO: 885960 - DNA, 75 bp, synthetic construct
  source 1..75: mol_type = other DNA
ctatcagtattaccggtcaaaaaccgaccgaagggccgtttagcgcgctggggtatttacgcgtcgattatcaat

SEQ ID NO: 885961 - DNA, 75 bp, synthetic construct
  source 1..75: mol_type = other DNA
tggtgcgtcagacgctgcgtaagtacaagtatccgccagataaaacaccttatgcagttgaactgatactgaagc

SEQ ID NO: 885962 - DNA, 75 bp, synthetic construct
  source 1..75: mol_type = other DNA
tgctggagaaactgctgaacgacggcattcatgcccgcaccaaaaacaacgtggtgcaggagaagaaatactcag

SEQ ID NO: 885963 - DNA, 75 bp, synthetic construct
  source 1..75: mol_type = other DNA
gccggtgtggtgtggcatacgcagggttccggtaagagtatctcgatgtgttgttacgccggaaaactgctacaa

SEQ ID NO: 885964 - DNA, 75 bp, synthetic construct
  source 1..75: mol_type = other DNA
ttataaaaatatagataaaaatatcgaaaaatatatagctatagttctcgaaaattgtgagaatagtatagctga

SEQ ID NO: 885965 - DNA, 75 bp, synthetic construct
  source 1..75: mol_type = other DNA
aaaaaatacccagaacaaaattcaaaataaaaaagaaagtatttcggagaaatgtattaacaaatacaatttttt

SEQ ID NO: 885966 - DNA, 75 bp, synthetic construct
  source 1..75: mol_type = other DNA
gacggtttttagaatcgataaaaaccgcatacattgcttttaataaaagcctaaaaaaatcacatgaggaaaata

SEQ ID NO: 885967 - DNA, 75 bp, synthetic construct
  source 1..75: mol_type = other DNA
tgtttttgaacctgctgtaggaacgctaaacattggtgcagctcacggtgaggcggcggcagatgccgggtatat

SEQ ID NO: 885968 - DNA, 75 bp, synthetic construct
  source 1..75: mol_type = other DNA
agcagtcatctgagttttacgagatgatgttctcgtgtcggcgatcgtcgttccggcctgagaactatcctcgtg

SEQ ID NO: 885969 - DNA, 75 bp, synthetic construct
  source 1..75: mol_type = other DNA
gttccatccaacaagaaaccgggatcgcgcgtaaacggagcggccctctttgctgacatgctggaggccgtcatt

SEQ ID NO: 885970 - DNA, 75 bp, synthetic construct
  source 1..75: mol_type = other DNA
agctgaacatcatgcccggaatttgtaagaaggttgttcccggtccggctgatggcgcaatttacaacaccggcg

SEQ ID NO: 885971 - DNA, 75 bp, synthetic construct
  source 1..75: mol_type = other DNA
tgaggaattgagaaaatttagacctgacatttacaatgtttgtgaacaggttgcctcatcctcatacattgatct

SEQ ID NO: 885972 - DNA, 75 bp, synthetic construct
  source 1..75: mol_type = other DNA
agcctgaacgttactacgaggtacgtagtgatgattctgcgattgatattcagattcatgaaaaacaaagcggaa

SEQ ID NO: 885973 - DNA, 75 bp, synthetic construct
  source 1..75: mol_type = other DNA
gttgagatcgtcgatttcctcaagaatccgcaggagtatggacggctcggggcgcgcattcccaagggcgtgttg

SEQ ID NO: 885974 - DNA, 75 bp, synthetic construct
  source 1..75: mol_type = other DNA
gccagcaggggcggcgtaagcctcgccgccggaggatgcgccccccaacaccgagtaagcgcgcagaggtctggt

SEQ ID NO: 885975 - DNA, 75 bp, synthetic construct
  source 1..75: mol_type = other DNA
cgccaacgctgcaagctgtgccggtgaaagccaatgatgcggcgctcagcgacggaaccttttctgcctacgcaa

SEQ ID NO: 885976 - DNA, 75 bp, synthetic construct
  source 1..75: mol_type = other DNA
aatgcggcggaatatttcttcgatccatccgtgggtatcaacgtttacggcagtgataataacgtgacgctggat

SEQ ID NO: 885977 - DNA, 75 bp, synthetic construct
  source 1..75: mol_type = other DNA
cgactggggcgagtctaagccgttctctaacctctggtgggcgcaggctgatggcacagccgccgagctgccaga

SEQ ID NO: 885978 - DNA, 75 bp, synthetic construct
  source 1..75: mol_type = other DNA
gctgacccgcgtggcaatccacggctcgtttaaagaaaacccgtacctcgacccgcagtacatcgcgaccctgat

SEQ ID NO: 885979 - DNA, 75 bp, synthetic construct
  source 1..75: mol_type = other DNA
ccgtgaaggcggtagatgctgtattaacagacggaacgttttcagcttcggccacattacgggtggaatatcaat

SEQ ID NO: 885980 - DNA, 75 bp, synthetic construct
  source 1..75: mol_type = other DNA
gtgttaatcaatggtgataatactacctttgtcaatgtgggggacatcaccacgacaaataacggtactggtgta

SEQ ID NO: 885981 - DNA, 75 bp, synthetic construct
  source 1..75: mol_type = other DNA
tccagggcttagcctggccgaagacctgaaagctgccatgcagcatggcacggttgaagggatgtcagtggggtt

SEQ ID NO: 885982 - DNA, 75 bp, synthetic construct
  source 1..75: mol_type = other DNA
agctccagttctcgctgtagttatcacctctgatcgattatctaataacaaaattttttgtcgatttctgcttgt

SEQ ID NO: 885983 - DNA, 75 bp, synthetic construct
  source 1..75: mol_type = other DNA
cattatttatactcttattcgtcgggtaaagtttgtaggaagaaacagcatggaattctgctttctatccggttt

SEQ ID NO: 885984 - DNA, 75 bp, synthetic construct
  source 1..75: mol_type = other DNA
ccggtgttgcccaactgaaagacagtaccttcactctggaacgcgacaacaccgctgcgcttactcacgcgatgt

SEQ ID NO: 885985 - DNA, 75 bp, synthetic construct
  source 1..75: mol_type = other DNA
ccagattgatattcgcggtatgggtccggaaaacacgctgattttgattgacggcaagccggtaagcagccgtaa

SEQ ID NO: 885986 - DNA, 75 bp, synthetic construct
  source 1..75: mol_type = other DNA
taagtctgcaggccgaagcgagttcggtagcgacgacattgacgcgctggcacagcgcattaactcatttgccgc

SEQ ID NO: 885987 - DNA, 75 bp, synthetic construct
  source 1..75: mol_type = other DNA
gaggctcaatttgtcgacccagataattgcaagttattctcgtatatcgttcgcggtgtttataagtacaaaaat

SEQ ID NO: 885988 - DNA, 75 bp, synthetic construct
  source 1..75: mol_type = other DNA
cgataaagtgaatgagattgtcggtaagctgcgcggtgccggttatcgggtttatacgtcgccatccacgccagt

SEQ ID NO: 885989 - DNA, 75 bp, synthetic construct
  source 1..75: mol_type = other DNA
accgcactggggatcgcgggcgctactttgctgacgggcaagtcgcctttttggggcgcaacgatacccaagtga

SEQ ID NO: 885990 - DNA, 75 bp, synthetic construct
  source 1..75: mol_type = other DNA
cgatgtgtcagatgtttatgtcacccatccagtattagaggttaaaaaaccatctgaatctgaagatgatgaaga

SEQ ID NO: 885991 - DNA, 75 bp, synthetic construct
  source 1..75: mol_type = other DNA
ttcgccaatcctcatcacgtgaagccaaaatacaagttgaaatgaatgaaagcggtgaatttatcacccgtttcc

SEQ ID NO: 885992 - DNA, 75 bp, synthetic construct
  source 1..75: mol_type = other DNA
gctattattagcacttgaaaaaaccgctcgcgaaatttcaaacagtattatcgcctccaacacaattgaggttgt

SEQ ID NO: 885993 - DNA, 75 bp, synthetic construct
  source 1..75: mol_type = other DNA
gcatttaagcaactttggtcggaaggatatgattttcaattatgtatagttggaaaacagggttggaatgttgag

SEQ ID NO: 885994 - DNA, 75 bp, synthetic construct
  source 1..75: mol_type = other DNA
gtagtttgccatctaagggaatgcctgagacagccacggcttttcttgcaggtatgagctcagttcctactttcc

SEQ ID NO: 885995 - DNA, 75 bp, synthetic construct
  source 1..75: mol_type = other DNA
acagtgcagagaggctgcaattgcagagattgcaccagatatagttttaattagcacatttttcgaaggatatac

SEQ ID NO: 885996 - DNA, 75 bp, synthetic construct
  source 1..75: mol_type = other DNA
tgctatttctgaaattttttctgaggttttcttttaactcattgaagtacctatgggcagcggtaataatgttat

SEQ ID NO: 885997 - DNA, 75 bp, synthetic construct
  source 1..75: mol_type = other DNA
gacgcaggctaattccacacttcccgatgacagtcagcatgacggactgatcttgaccctccatctccggacagc

SEQ ID NO: 885998 - DNA, 75 bp, synthetic construct
  source 1..75: mol_type = other DNA
ctgataactttgactccggtttaaaaagtgataatccggtattatttacaaaagacgatatattacttgtcgcgg

SEQ ID NO: 885999 - DNA, 75 bp, synthetic construct
  source 1..75: mol_type = other DNA
tgcatcttattacattatatttaaagatgcttccgtaagcagctttaatattatgaagccatctgctgtccatct

SEQ ID NO: 886000 - DNA, 75 bp, synthetic construct
  source 1..75: mol_type = other DNA
gattcggttgtttccgcatgtgtgccgattacgaagatgaaatggatccgagtaacgagcagcgacgcatcagcc

SEQ ID NO: 886001 - DNA, 75 bp, synthetic construct
  source 1..75: mol_type = other DNA
acaggtctattaaggatgctcctcagtatcccagagggttaggaatgtccaaaatggcactacaaggaatgttgt

SEQ ID NO: 886002 - DNA, 75 bp, synthetic construct
  source 1..75: mol_type = other DNA
aatattaatgatgccaaagcaaaatttcacggtttagttcatgaaaaagattgctatgttttttctgccgttggg

SEQ ID NO: 886003 - DNA, 75 bp, synthetic construct
  source 1..75: mol_type = other DNA
tcaagttttacgttctggcagaacgcgagtcatatccagatccgcatgctgataaccggtatgtcggtgcgtatg

SEQ ID NO: 886004 - DNA, 75 bp, synthetic construct
  source 1..75: mol_type = other DNA
gatgccattacatgtactttcaatgcttgtaacgatgatacaatacttgccattaaactcatcttacttgcaaaa

SEQ ID NO: 886005 - DNA, 75 bp, synthetic construct
  source 1..75: mol_type = other DNA
cagcgcagaaaaagctaccggtgattatccgcgatatcccggtgtttaaagagattgctcaggaacatgcgtggt

SEQ ID NO: 886006 - DNA, 75 bp, synthetic construct
  source 1..75: mol_type = other DNA
ttcaccggaagcgacaaggcagcactgacagcgctgacgaaagttggccgggacattctcgggaaggcatccgtc

SEQ ID NO: 886007 - DNA, 75 bp, synthetic construct
  source 1..75: mol_type = other DNA
acagcaccagtgaagagctggcggcaacgccaaaggcagtaaaagcagcctatgacaatgctgaaaaacgtatgc

SEQ ID NO: 886008 - DNA, 75 bp, synthetic construct
  source 1..75: mol_type = other DNA
agcatcttggtttatggcgtaacagtagctcagctatagcttcatttgcccgcaattatccggaagaagggagct

SEQ ID NO: 886009 - DNA, 75 bp, synthetic construct
  source 1..75: mol_type = other DNA
ccagcgtgacgatggtaaacagcgtgagttccagccttacattgaagcgaattggatcaacaacagcaaagtcta

SEQ ID NO: 886010 - DNA, 75 bp, synthetic construct
  source 1..75: mol_type = other DNA
ggctgaccgggtgagtgaggaaagccgccgctggctggcatcgtgcggcctgactgtggcgcagatgcaaagcca

SEQ ID NO: 886011 - DNA, 75 bp, synthetic construct
  source 1..75: mol_type = other DNA
aatattgaagcgtttccccccggcgttccactgccgtggccatcagatacaccacctgctggctatgccattatg

SEQ ID NO: 886012 - DNA, 75 bp, synthetic construct
  source 1..75: mol_type = other DNA
ggcggcccgcgatatcgctatcgccaatatcgcgcctgatattgtctatgttattagcttcttcgaaggtcatgg

SEQ ID NO: 886013 - DNA, 75 bp, synthetic construct
  source 1..75: mol_type = other DNA
gttaccagtcggaaagtaaattccgcggtatcggtcgcagtaccctggccatgagccgcgcaattattgaaaatg

SEQ ID NO: 886014 - DNA, 75 bp, synthetic construct
  source 1..75: mol_type = other DNA
ttagccttgtatgagcaaaacgctcatcctcgttccgaaaatatcaactggttaacttggaagcagagtgcggaa

SEQ ID NO: 886015 - DNA, 75 bp, synthetic construct
  source 1..75: mol_type = other DNA
tgcagatggctggattttcccctatatttccagacacctgttatcacttaacccattactggcccgctgccgtag

SEQ ID NO: 886016 - DNA, 75 bp, synthetic construct
  source 1..75: mol_type = other DNA
aacgctgacgttacgcgatgaacccagacgctatatcaaccgactgtcagacgcgctgttctcgatggcgagaat

SEQ ID NO: 886017 - DNA, 75 bp, synthetic construct
  source 1..75: mol_type = other DNA
acttgggattttcaggaatgtcctgaatgtagtgtcccatccgtaatttatttaccggaacaaagggccggtgtc

SEQ ID NO: 886018 - DNA, 75 bp, synthetic construct
  source 1..75: mol_type = other DNA
cagcccgagagctggtcgatcgctcgcgagtgctggtgcatgtgatggttgataatcctgatgatatcggtccga

SEQ ID NO: 886019 - DNA, 75 bp, synthetic construct
  source 1..75: mol_type = other DNA
tcgttttcattacgaccagccgaagcagaaaaagattcatttgctctgaagttaattcatttagatcttgatgaa

SEQ ID NO: 886020 - DNA, 75 bp, synthetic construct
  source 1..75: mol_type = other DNA
gggtgattttgtactggaaacggctattggagaatttggggcatttagccgtgaatatgaaattacgaatgattt

SEQ ID NO: 886021 - DNA, 75 bp, synthetic construct
  source 1..75: mol_type = other DNA
tttggcagttggtatgctttgcatctatggattagagtttgttgaggcgatatatggaagtcagaaattttatga

SEQ ID NO: 886022 - DNA, 75 bp, synthetic construct
  source 1..75: mol_type = other DNA
ggctttctatgtttgcctggggctggcatcacgaagcggggatccatttgttgcggctgatgttatcgggcgcat

SEQ ID NO: 886023 - DNA, 75 bp, synthetic construct
  source 1..75: mol_type = other DNA
cagcgagttagggcgagcgtgtatgcctgttgcgcttgagcaggcacctttccttggcgactgggggaaaaccgt

SEQ ID NO: 886024 - DNA, 75 bp, synthetic construct
  source 1..75: mol_type = other DNA
ggtctccacgcccaaagtacgtcaccatcccgcgctggatttgaatcttatccctgatttcctggaaagagtcga

SEQ ID NO: 886025 - DNA, 75 bp, synthetic construct
  source 1..75: mol_type = other DNA
taaatcaacgaacaaaactgccggtatttatatttttactgttaagcgtttttttaaatacagtattgaaactta

SEQ ID NO: 886026 - DNA, 75 bp, synthetic construct
  source 1..75: mol_type = other DNA
tggcaacaattacacaacaaatgaatcaggttcaggaagctgttaacggtgctttcaaacccctgatctctaatg

SEQ ID NO: 886027 - DNA, 75 bp, synthetic construct
  source 1..75: mol_type = other DNA
gacatcacatggcttgcttgaggccgctggtgtttcgattgtttcagtcgggtcaaagacatctataccgcttgc

SEQ ID NO: 886028 - DNA, 75 bp, synthetic construct
  source 1..75: mol_type = other DNA
tcttctgcatatcaatgtttcaccttggcagttaaatgaatttgatttccatacccgcgttttgaatttaattaa

SEQ ID NO: 886029 - DNA, 75 bp, synthetic construct
  source 1..75: mol_type = other DNA
ggggattttggaccgcttgttggtgaaaaactaccttttagtcctggattggataataaaccattgcattgggtc

SEQ ID NO: 886030 - DNA, 75 bp, synthetic construct
  source 1..75: mol_type = other DNA
tgggttaaaaagatgaacggagaatttcctgaagcgcaggatatcgatagttacgattataatgatcataattca

SEQ ID NO: 886031 - DNA, 75 bp, synthetic construct
  source 1..75: mol_type = other DNA
ttggcgacagggggaaaaccgtcgctgatggtcataatcctgaccgactccctgctttcccgctttaataaactg

SEQ ID NO: 886032 - DNA, 75 bp, synthetic construct
  source 1..75: mol_type = other DNA
gtcttaatgaatcatattgtcatcgtcagcgatgaatttgtttctttgtgtgcacgacatcaattaaaaataaac

SEQ ID NO: 886033 - DNA, 75 bp, synthetic construct
  source 1..75: mol_type = other DNA
taaagacaataaagacaataaagacaataaagacaataaagacaataaagacaataaagacaataaagacaataa

SEQ ID NO: 886034 - DNA, 75 bp, synthetic construct
  source 1..75: mol_type = other DNA
gcatggcaaagatattgcgtcctgctcgactaaccctggcggggctgaatgtaaacgcggtgaggctgtaaacaa

SEQ ID NO: 886035 - DNA, 75 bp, synthetic construct
  source 1..75: mol_type = other DNA
tggcgagaaccctatggtgctttttccagcgtgtttggaaatgatgattcatcaaaagagaatccaaatgtcggg

SEQ ID NO: 886036 - DNA, 75 bp, synthetic construct
  source 1..75: mol_type = other DNA
ctaactatccatatggtaaggttagaggcgctaaggctgatttttatcttgagtcctatatgaatttagccaaag

SEQ ID NO: 886037 - DNA, 75 bp, synthetic construct
  source 1..75: mol_type = other DNA
tatgcatcagccagttcctctacagcgcacaaatccgcccatcttccgtggtgaccaaagactacacctttaaac

SEQ ID NO: 886038 - DNA, 75 bp, synthetic construct
  source 1..75: mol_type = other DNA
tcagtgaccttcacaacgaagcggattataaagtcagtcacagtggaatcagtctgagcggtggtggcagcttcg

SEQ ID NO: 886039 - DNA, 75 bp, synthetic construct
  source 1..75: mol_type = other DNA
gttgacccggggcatgaccgtcgtactgtggacgaaaaatttgagcagaagaaaagcgggctgacggttgccctt

SEQ ID NO: 886040 - DNA, 75 bp, synthetic construct
  source 1..75: mol_type = other DNA
tctacgagttaatgggggcagaaaggatcctgttctccgtcgattatccctatcagaccctggacggtgtaaaaa

SEQ ID NO: 886041 - DNA, 75 bp, synthetic construct
  source 1..75: mol_type = other DNA
ctccgtcgacaggggttaatgttactggtgacagcaataaggtaacgcttgatggtcagttgactatgattgttg

SEQ ID NO: 886042 - DNA, 75 bp, synthetic construct
  source 1..75: mol_type = other DNA
cagcaggatagcaacaaatacgacagcaagcagaacagcgtggctgctggcggcagttttacctttggttccatg

SEQ ID NO: 886043 - DNA, 75 bp, synthetic construct
  source 1..75: mol_type = other DNA
agcgatatgcagcggggtatccaggccgcgacagccgcgcttcagggactggctggggggaatttagcgggtgct

SEQ ID NO: 886044 - DNA, 75 bp, synthetic construct
  source 1..75: mol_type = other DNA
ggtaacagagaaagtaaatcaataggtaatgactccaacttattgatagtgttttatgttcagataatgcccgat

SEQ ID NO: 886045 - DNA, 75 bp, synthetic construct
  source 1..75: mol_type = other DNA
ttttatgtctttccagaaaaaagtgtaagctataatatactaaagcaaggtaaacatgcttttattttgagggta

SEQ ID NO: 886046 - DNA, 75 bp, synthetic construct
  source 1..75: mol_type = other DNA
actgaacttaatcatgataaagcaaaggaactggtaaccaccaacctgaagcaggcattaccattaaatacggta

SEQ ID NO: 886047 - DNA, 75 bp, synthetic construct
  source 1..75: mol_type = other DNA
ttttggttggtacgccgcggctggagtccgctgcgtctgattgcagttaccgtggttctcggcatcgtcggtaaa

SEQ ID NO: 886048 - DNA, 75 bp, synthetic construct
  source 1..75: mol_type = other DNA
gttttgtttttattagaagatgaagttgtagaacagattactttttatgcaaagcaggatgaggggttttctgag

SEQ ID NO: 886049 - DNA, 75 bp, synthetic construct
  source 1..75: mol_type = other DNA
tcaaatactaggccgccctttggcttcaggtggtggaaaaatggatgcgcttatgggttatatcgatcgttggat

SEQ ID NO: 886050 - DNA, 75 bp, synthetic construct
  source 1..75: mol_type = other DNA
cgggtgacaaaccggcgcgattctgcattcagtgcggactggtaaaacctgacgcgctggtggaaatcgccacaa

SEQ ID NO: 886051 - DNA, 75 bp, synthetic construct
  source 1..75: mol_type = other DNA
tccgctgaccagacgatagattttggacaaatttcaaaaacggctttggataatgatggaacatcagagcaaaag

SEQ ID NO: 886052 - DNA, 75 bp, synthetic construct
  source 1..75: mol_type = other DNA
cattacttagtaaattctatttacactcaaataaaatagatgttgtaattttagtatggttatggatgcttcttt

SEQ ID NO: 886053 - DNA, 75 bp, synthetic construct
  source 1..75: mol_type = other DNA
gccggtacctctatgacccgctgggccgccggacgggtaaacgggtgtggcggcgggagcgtgacctgacggggt

SEQ ID NO: 886054 - DNA, 75 bp, synthetic construct
  source 1..75: mol_type = other DNA
ccaacgagaacggcagccagtccacgttccggtatgacccggttgacaggctgactgaacagcgcggttttgacg

SEQ ID NO: 886055 - DNA, 75 bp, synthetic construct
  source 1..75: mol_type = other DNA
gttccggtagagaacaggcagtcctatccggtgcttgttgagtccttcatcatggatgaaggaaatgagcataaa

SEQ ID NO: 886056 - DNA, 75 bp, synthetic construct
  source 1..75: mol_type = other DNA
ggatggttacgttattgatcaggactaccgtggaaatcgctatgcaaaagataagcaggtagcccgctgcggtaa

SEQ ID NO: 886057 - DNA, 75 bp, synthetic construct
  source 1..75: mol_type = other DNA
cacatgcggtaattcataacgagcaatacagaagtcttatagagggatatatgttacggcacaaagttaagccgg

SEQ ID NO: 886058 - DNA, 75 bp, synthetic construct
  source 1..75: mol_type = other DNA
caaaacggcgacctgtttgttagcggcgcggcgcacggcattgatgtcagtggcgatcgcgcgaaaatcagcaac

SEQ ID NO: 886059 - DNA, 75 bp, synthetic construct
  source 1..75: mol_type = other DNA
ccattacgcgaggggttcagaagttctcacataacggtcgctgggcaaccgtgtgttattggggatctgcactaa

SEQ ID NO: 886060 - DNA, 75 bp, synthetic construct
  source 1..75: mol_type = other DNA
cgcaacgggttatctgccgcatcgatgaatgccggggatggagcgccgggctggcgctggctccggtcatgttcc

SEQ ID NO: 886061 - DNA, 75 bp, synthetic construct
  source 1..75: mol_type = other DNA
gtcagcgatagccagcaccctgaaatcagcgtcactttccgacatcgaaatgcgtggttttacctttgatcaaaa

SEQ ID NO: 886062 - DNA, 75 bp, synthetic construct
  source 1..75: mol_type = other DNA
ggaagtgttattgatactggtggacatcaagaggtatctggtcatggctcttatcaggggcaggctaataataca

SEQ ID NO: 886063 - DNA, 75 bp, synthetic construct
  source 1..75: mol_type = other DNA
caatcaaacgcggggtgcagcagtttgagcatttaggccaatgggctaaggtctgctattggggatacagtcttg

SEQ ID NO: 886064 - DNA, 75 bp, synthetic construct
  source 1..75: mol_type = other DNA
gctgcgcgcatgtgactacggcgcgccgacgatcagaaagcgtttcttcatggtcatgcgctgtgacggccgcaa

SEQ ID NO: 886065 - DNA, 75 bp, synthetic construct
  source 1..75: mol_type = other DNA
tattgcgagtcggtgtttgacgttgacccaagcgcagccaccagcggtaaacctgtcggtctggcctggtttagc

SEQ ID NO: 886066 - DNA, 75 bp, synthetic construct
  source 1..75: mol_type = other DNA
gcggtaacgcggtgccaccgccgttcgctgaagcgctggtgcgtgctaatttgccggaactatgccaatcgaaac

SEQ ID NO: 886067 - DNA, 75 bp, synthetic construct
  source 1..75: mol_type = other DNA
cgttaccgaacccgtcccgacggtaaccgctggcacatcaaaacgtccgggcgggaatgggcatgctctgggtat

SEQ ID NO: 886068 - DNA, 75 bp, synthetic construct
  source 1..75: mol_type = other DNA
agagattcgtggtttggcgtggattgtcattcgctgggcgctggcggtacgtccccgtgtgatgatgctggagaa

SEQ ID NO: 886069 - DNA, 75 bp, synthetic construct
  source 1..75: mol_type = other DNA
gggccgcgtatcgacgggctggattacaaatctttctataattacaacgatgtagaagatatcaacttaacgcaa

SEQ ID NO: 886070 - DNA, 75 bp, synthetic construct
  source 1..75: mol_type = other DNA
agtgggtgcagcaggcgccctgatggtggcaggcaccggcatcgtcaccctgagccttctgccgcagctgggtcg

SEQ ID NO: 886071 - DNA, 75 bp, synthetic construct
  source 1..75: mol_type = other DNA
actacgaggtagacgcccgcactgggaaactacttgccgcgcaacagcaggcggacgaagcgttcgatcgcattg

SEQ ID NO: 886072 - DNA, 75 bp, synthetic construct
  source 1..75: mol_type = other DNA
gttgaatacaggcactatcaacgtcaacaatgaaggttttggtatgctggcgctgaacggcggtacagcggtaaa

SEQ ID NO: 886073 - DNA, 75 bp, synthetic construct
  source 1..75: mol_type = other DNA
caagatcatctaaggggagtacgctatctcaatcaacttacagatgaatcacgtagagtaatatcaaacgctgtt

SEQ ID NO: 886074 - DNA, 75 bp, synthetic construct
  source 1..75: mol_type = other DNA
agcatatcaactacgtatggctttagatggtggctgtactaaggcagatctactaaaggttatagctacaattta

SEQ ID NO: 886075 - DNA, 75 bp, synthetic construct
  source 1..75: mol_type = other DNA
cataacggcgttgccgggagaaaatcaggccagcgactcaaaagttgcgatgattcactctagcggagagggatc

SEQ ID NO: 886076 - DNA, 75 bp, synthetic construct
  source 1..75: mol_type = other DNA
ccagttccaccagacgatggtggcgatacaccagttccaccagacgacggtggtgatacacctgttcctccagat

SEQ ID NO: 886077 - DNA, 75 bp, synthetic construct
  source 1..75: mol_type = other DNA
cttaatgatggtgatcatcatgacagttcagaaccagatgacggtggtgatacacctgttccaccagatgacggt

SEQ ID NO: 886078 - DNA, 75 bp, synthetic construct
  source 1..75: mol_type = other DNA
ccataaagttattgcctgatgccatcaccactaccgacaggcaataccgcctggagacgcagggaggtaatgctt

SEQ ID NO: 886079 - DNA, 75 bp, synthetic construct
  source 1..75: mol_type = other DNA
gcatacctggcaaacgttgctacaatgggcggcgctggtacagccgggcttaccgggctaactactggcgtagct

SEQ ID NO: 886080 - DNA, 75 bp, synthetic construct
  source 1..75: mol_type = other DNA
cggcatcaagaaactgaacacgcagatgaccaaaacgtctgccgcagtcaaaaccaatctttccccggcaatccg

SEQ ID NO: 886081 - DNA, 75 bp, synthetic construct
  source 1..75: mol_type = other DNA
tctgtgttgcgatggcgttaagtagccagacatgggctgcggataccactacaaccgagtcagccgatgaaacac

SEQ ID NO: 886082 - DNA, 75 bp, synthetic construct
  source 1..75: mol_type = other DNA
tacatcgggcatgttataaagtcgataacgtggagaaaatcaaaaaaacagtcgtgaaaatcgacatgagtctat

SEQ ID NO: 886083 - DNA, 75 bp, synthetic construct
  source 1..75: mol_type = other DNA
ttatatcactggcgattatgaagtaattcccgctgcggaaatctgtcactactttattgctgatcaacaaggcca

SEQ ID NO: 886084 - DNA, 75 bp, synthetic construct
  source 1..75: mol_type = other DNA
gtgtttgacggcattggcaaaaacagtgagggcttgactcaggtatttaatgacgttcacaaatacaacctcaaa

SEQ ID NO: 886085 - DNA, 75 bp, synthetic construct
  source 1..75: mol_type = other DNA
tgacgtacacaaatacaaccccaaaaccaatagctgggttaaattgatgtcgcacgcgccgatgggcatggcggg

SEQ ID NO: 886086 - DNA, 75 bp, synthetic construct
  source 1..75: mol_type = other DNA
tcattatcgacagcatggcttcgctggtacttacggacggcagcgtgacaaaccatagcaaacgccatttgctga

SEQ ID NO: 886087 - DNA, 75 bp, synthetic construct
  source 1..75: mol_type = other DNA
gctatatggcccaatattatgctacaggaaaagcaattgtaggggatgtcatttctagtgttaattacactattg

SEQ ID NO: 886088 - DNA, 75 bp, synthetic construct
  source 1..75: mol_type = other DNA
ttttctttattaaaggaggtgcggaaaccgtttattttcaggagagaaactggctgaaagcagcgggtgtcgacg

SEQ ID NO: 886089 - DNA, 75 bp, synthetic construct
  source 1..75: mol_type = other DNA
aatggttcagctatataataaatctgagccaagatattctcctttaacataccattatgttaacaaaaaaggtaa

SEQ ID NO: 886090 - DNA, 75 bp, synthetic construct
  source 1..75: mol_type = other DNA
gctagaaagcgttgcgataacccaaactgacgccgatcatgccgatgccgttgtgcgctttcgtatctttaaaga

SEQ ID NO: 886091 - DNA, 75 bp, synthetic construct
  source 1..75: mol_type = other DNA
aaggaaaaggaaaagttgaaaaaaagttttatagaaagaattacgatccagactagtaatgtatctaaaaaatga

SEQ ID NO: 886092 - DNA, 75 bp, synthetic construct
  source 1..75: mol_type = other DNA
catgaaaaaggtaatataacggacgcagaaatttattataaatttctgtgcatttatgcgttcgaaaatcatgaa

SEQ ID NO: 886093 - DNA, 75 bp, synthetic construct
  source 1..75: mol_type = other DNA
agagataccagactcaacgggtgactacaatgtgacttcgccagtatttggggtgatcacttacatcatcaatga

SEQ ID NO: 886094 - DNA, 75 bp, synthetic construct
  source 1..75: mol_type = other DNA
actacgtagaagagcgcatttcgctcgacaagcgcatcatatcgagaccagcggcaacgtacttcatgagagcgg

SEQ ID NO: 886095 - DNA, 75 bp, synthetic construct
  source 1..75: mol_type = other DNA
gagagcggcaacagcacgccgttatttgtggcgcaggggaatcagctgttcatgaacgacgtgttcctgaagcgg

SEQ ID NO: 886096 - DNA, 75 bp, synthetic construct
  source 1..75: mol_type = other DNA
gcaccttataaatattcaggccgaccaccctcttagccgggagccgataaccacatcaatgattatttcgaaaga

SEQ ID NO: 886097 - DNA, 75 bp, synthetic construct
  source 1..75: mol_type = other DNA
agatataccccagcttcagtccgcagccaggcaagccggtactgttaatgctactatcggccacagagcatatac

SEQ ID NO: 886098 - DNA, 75 bp, synthetic construct
  source 1..75: mol_type = other DNA
gcgcaagaaagaagccatgcgccagcttaaagcatcctttgagcgcgccagcattgaagggactttgcataaacg

SEQ ID NO: 886099 - DNA, 75 bp, synthetic construct
  source 1..75: mol_type = other DNA
tcgccagctggcgcaatagcgaagaagcccgcactgttcgcccctccccgcagttgcgcagcctgaatggtgagt

SEQ ID NO: 886100 - DNA, 75 bp, synthetic construct
  source 1..75: mol_type = other DNA
aaaactctgggtttttggtggatggtatggacaacgaatttctgacaacccaaaatacttactccaatacgtaaa

SEQ ID NO: 886101 - DNA, 75 bp, synthetic construct
  source 1..75: mol_type = other DNA
gcagaatatgatgaatggggcaacctgctgaatgaagagaacccgcatcagctgcagcagcttatccggctgccg

SEQ ID NO: 886102 - DNA, 75 bp, synthetic construct
  source 1..75: mol_type = other DNA
acaacatcgccgccatgcttcatggtgccgaacctgtaacgacggcttacaagttgccggatggttggataagct

SEQ ID NO: 886103 - DNA, 75 bp, synthetic construct
  source 1..75: mol_type = other DNA
gtctggtgacggttccgcaccctaaaaaagatattaagcccggtacgctggcgcaaattgggcgtcaggctggtt

SEQ ID NO: 886104 - DNA, 75 bp, synthetic construct
  source 1..75: mol_type = other DNA
tggcattatcctcaactatggtgagattaatctcaacggagcggaaattgatagcgccgactctcattatggtgc

SEQ ID NO: 886105 - DNA, 75 bp, synthetic construct
  source 1..75: mol_type = other DNA
ccacaaacggttacagtgcgattaaaactgccagcacagcctctaacagcaacggcaaatggatttggaatacag

SEQ ID NO: 886106 - DNA, 75 bp, synthetic construct
  source 1..75: mol_type = other DNA
ctgacgctgacctgctcagacaagcatatgaccttctcttacagcgttccagcaaaggactatcgggtctcagcc

SEQ ID NO: 886107 - DNA, 75 bp, synthetic construct
  source 1..75: mol_type = other DNA
ttgatgcaaggtatttttcatgccggtagggaaagtagactttgggttgatactaaagaatatggagtagaattt

SEQ ID NO: 886108 - DNA, 75 bp, synthetic construct
  source 1..75: mol_type = other DNA
atgaaacgactcgcacttttgctgatttgtggtgtatgcgggggcgttcaggcctcaccggatatcaccttccac

SEQ ID NO: 886109 - DNA, 75 bp, synthetic construct
  source 1..75: mol_type = other DNA
gatttgacacaaaagccgaagctggaggctgtgccggtaaaagcgagcggcgccacattaaatgacggcgcgttt

SEQ ID NO: 886110 - DNA, 75 bp, synthetic construct
  source 1..75: mol_type = other DNA
agagaacgaaggtttattagtatagacaaagacaatttcaatgaagttatgacgtcaatgagtccgaaggctcat

SEQ ID NO: 886111 - DNA, 75 bp, synthetic construct
  source 1..75: mol_type = other DNA
ggctgtaaccaccgatatcaatggattagcaatacatcttaaacaagccggaagcgattttaagctgaatacccc

SEQ ID NO: 886112 - DNA, 75 bp, synthetic construct
  source 1..75: mol_type = other DNA
ccggtgttaaccgcagtaccggtcaaaaagagcggtgtcgatttgcctgaggcagactttgaagcctgggccacg

SEQ ID NO: 886113 - DNA, 75 bp, synthetic construct
  source 1..75: mol_type = other DNA
atgaaacgactcgcacttttgctgatttgtggtgtatgcgggggtgctctggcctcaccggatatcacctttcac

SEQ ID NO: 886114 - DNA, 75 bp, synthetic construct
  source 1..75: mol_type = other DNA
ccacgcccttctggaaaaaactcccgttccagctgggcgctgccgccgtcgtgtgcgtgttatttgtcagttgtc

SEQ ID NO: 886115 - DNA, 75 bp, synthetic construct
  source 1..75: mol_type = other DNA
ttttgaagtcacaacagcaattctgtttatcagtgaagaacgtcccagaggtattccgaaaaaccaaataccttt

SEQ ID NO: 886116 - DNA, 75 bp, synthetic construct
  source 1..75: mol_type = other DNA
tgcttctttgaattatctgtcgtacgcaggcataagcgacatcacagcagaatattggcgatcaaatgcgcgcca

SEQ ID NO: 886117 - DNA, 75 bp, synthetic construct
  source 1..75: mol_type = other DNA
atgtaccagaaaacttaccactgaataatgctgcggtactaatcaagcaaaaatggctggcaccaaccagtactg

SEQ ID NO: 886118 - DNA, 75 bp, synthetic construct
  source 1..75: mol_type = other DNA
atcgctgaatatcaagcttgacactcctgctgcaagccaggatatcgagtggcgtgcttccctgccaattgttgt

SEQ ID NO: 886119 - DNA, 75 bp, synthetic construct
  source 1..75: mol_type = other DNA
gacacctccgtgtcctccgtgcagcccccgtcatcaccggcctccccggccagaaaggccccacgtacagcccgg

SEQ ID NO: 886120 - DNA, 75 bp, synthetic construct
  source 1..75: mol_type = other DNA
acgcctgtgtgccgtgttaatgacaaaagcagataaaaaagttgttattttttttcataacatgatcagtgtcag

SEQ ID NO: 886121 - DNA, 75 bp, synthetic construct
  source 1..75: mol_type = other DNA
aaaggcaccatgactgtcaccgatccggagtccatcggtattcagatcgacggcgacaaggccatcgtcaataac

SEQ ID NO: 886122 - DNA, 75 bp, synthetic construct
  source 1..75: mol_type = other DNA
actttctcatatcaaaacgacaaattgtgcacggtgcaaaccagtgggctgggccatgtcgttctcgccggacag

SEQ ID NO: 886123 - DNA, 75 bp, synthetic construct
  source 1..75: mol_type = other DNA
caaatgaaaatctccgttttaaactcaacggtagccagcgagtcacctggacgagtgatgaaataagtaatggat

SEQ ID NO: 886124 - DNA, 75 bp, synthetic construct
  source 1..75: mol_type = other DNA
tactcccgtaactggaatgtttccgagttggctagcatggttttaatgagtgaatcttctttaaaaagacgaatg

SEQ ID NO: 886125 - DNA, 75 bp, synthetic construct
  source 1..75: mol_type = other DNA
ttatttgatcatgacattgaacgattaaaaaaaatttccaaaactcagcttatatctcccgattatgttttgatt

SEQ ID NO: 886126 - DNA, 75 bp, synthetic construct
  source 1..75: mol_type = other DNA
accggcgatacaggcgcaaatagttattttttggatcttcctgatatgggcgtttccgacgtcgtaaacaagaca

SEQ ID NO: 886127 - DNA, 75 bp, synthetic construct
  source 1..75: mol_type = other DNA
taaacaattaggagtgtgtgctaaatcgctcgatagaattactggcgctagagatcgcgcaatcagaatgcttaa

SEQ ID NO: 886128 - DNA, 75 bp, synthetic construct
  source 1..75: mol_type = other DNA
acaaaataatattttcgccagaattcttacgtgaagggaaagcactatatgataatctctatccatctcgaatta

SEQ ID NO: 886129 - DNA, 75 bp, synthetic construct
  source 1..75: mol_type = other DNA
gagcaggatttaccgatttcactaaccgtggtcggcattgcaccggaagaactatctgcatgggctggtgcggac

SEQ ID NO: 886130 - DNA, 75 bp, synthetic construct
  source 1..75: mol_type = other DNA
gcagccgttcacattcgaatggaacggacacacctggaatggcggccccgactcgctggcccgcctttacccggt

SEQ ID NO: 886131 - DNA, 75 bp, synthetic construct
  source 1..75: mol_type = other DNA
tacacattgatgtggctgcagatcctcttacggctctgtccggggaagataaatggaatattgagggcggactca

SEQ ID NO: 886132 - DNA, 75 bp, synthetic construct
  source 1..75: mol_type = other DNA
ttttagttgtgggactggaggtatagttgatctatcctctctggacttacggaatatcgatttagaactttatga

SEQ ID NO: 886133 - DNA, 75 bp, synthetic construct
  source 1..75: mol_type = other DNA
ggcagtagcggtggcagtaccaaaacggttgatttcaagagtgtttcaaccgctgaagtgtttgcgaaaaccaaa

SEQ ID NO: 886134 - DNA, 75 bp, synthetic construct
  source 1..75: mol_type = other DNA
gctggacttgtcgattccttaccccagggggcgcgttatcaggcctggacgcgtaaagagccggttggcgtggta

SEQ ID NO: 886135 - DNA, 75 bp, synthetic construct
  source 1..75: mol_type = other DNA
gatgccaatactgctggatatatcgataaatctcctgtttattttttagggaatacagatcttactgtttctgcc

SEQ ID NO: 886136 - DNA, 75 bp, synthetic construct
  source 1..75: mol_type = other DNA
gaaattaaacttgggaattccaaaaaaaacagagcattacctaatgaacgatcacgtgttttcattcttaatgaa

SEQ ID NO: 886137 - DNA, 75 bp, synthetic construct
  source 1..75: mol_type = other DNA
ctgtttcctgagatggaccaccatctggtcagctcattactaagcggtcggggcaccccaccatgccttatctgg

SEQ ID NO: 886138 - DNA, 75 bp, synthetic construct
  source 1..75: mol_type = other DNA
ggcctgtttaaaggcgacctgcagttctctgatccggagttccataaaaaagagaccacgctgctgggcagccga

SEQ ID NO: 886139 - DNA, 75 bp, synthetic construct
  source 1..75: mol_type = other DNA
ttatattgaagttgacgggaatcagcaggttcaacctggtaaatatttgttctcagtaagtggggaatgctatat

SEQ ID NO: 886140 - DNA, 75 bp, synthetic construct
  source 1..75: mol_type = other DNA
aactcttccgctatacctccaccgagcgcgctaaacgcaacctgatggtatttatccgtccgacgattatccgtg

SEQ ID NO: 886141 - DNA, 75 bp, synthetic construct
  source 1..75: mol_type = other DNA
tggttttagccgcagcgtcgattgcggcatgcggcgcgccctctgcaatggcaggtacaccttctgtcggattga

SEQ ID NO: 886142 - DNA, 75 bp, synthetic construct
  source 1..75: mol_type = other DNA
gtcccggttgacggcgcagcaagaaccgatctcaccgccggtgatttttattcaccgaccaccctgaccatttcg

SEQ ID NO: 886143 - DNA, 75 bp, synthetic construct
  source 1..75: mol_type = other DNA
gatataatcgtaccggtcgcttctgcgacgcctgggcaaggtaatgttcctgcggcaccagtcaatgctgtaagt

SEQ ID NO: 886144 - DNA, 75 bp, synthetic construct
  source 1..75: mol_type = other DNA
gtgacactggatggtaaattaacgcttgttgcggatggtgaaactaccacacgtgatgtctcaaattttgatggt

SEQ ID NO: 886145 - DNA, 75 bp, synthetic construct
  source 1..75: mol_type = other DNA
ctaatgcaagtattggtgacgctcctttgttgtttgggggaagcgtgccggggttaacagtgaaaggtatggcga

SEQ ID NO: 886146 - DNA, 75 bp, synthetic construct
  source 1..75: mol_type = other DNA
tgcacgtagacggcacgctgcatttgttgctgggcggcgatggtaaatcggcggactttagcccactggcgcgtt

SEQ ID NO: 886147 - DNA, 75 bp, synthetic construct
  source 1..75: mol_type = other DNA
ggcctgtgccagccttgatcagttcaagaactttgaacaacgaggcaatgagtttgcccgtctggcgaaggagtt

SEQ ID NO: 886148 - DNA, 75 bp, synthetic construct
  source 1..75: mol_type = other DNA
cagctggcggcgctacgcccggaagtggcagaacaaaccgaaactatggaacaggcgatgcgcttgctggctccg

SEQ ID NO: 886149 - DNA, 75 bp, synthetic construct
  source 1..75: mol_type = other DNA
cggaatatcaaaagtagatgcttgtagttgtccgaattggtcaaaaggaataattgtagctgatgctgacgattc

SEQ ID NO: 886150 - DNA, 75 bp, synthetic construct
  source 1..75: mol_type = other DNA
agtacggaagcggcgctgaatggcttgcacgtagacggcacgctgcatttgttgctgggcggcgatggtaaatcg

SEQ ID NO: 886151 - DNA, 75 bp, synthetic construct
  source 1..75: mol_type = other DNA
ttggtgtgggtggcaatattggcctgcctgcgttgatgctgctggatgatgagtgcgaactgtacgtgctggaac

SEQ ID NO: 886152 - DNA, 75 bp, synthetic construct
  source 1..75: mol_type = other DNA
cgttactgggacgctatgaaacctggcgggttgcaccgttatcgttacttactggtgcccgtagtcggactggca

SEQ ID NO: 886153 - DNA, 75 bp, synthetic construct
  source 1..75: mol_type = other DNA
ctcgctgattctcgatggttccgcatccattggagaaaggcgcgccagtcatcgaacaacatgcggcggattttg

SEQ ID NO: 886154 - DNA, 75 bp, synthetic construct
  source 1..75: mol_type = other DNA
gcagcatttagttgggcgtgcggcaatatcttcaataaaaaaataatgtcacactcaacgcgtccggcagtgatg

SEQ ID NO: 886155 - DNA, 75 bp, synthetic construct
  source 1..75: mol_type = other DNA
tgctctctccggcctgtgccagcctcgatcagttcaagaactttgaacaacggggcaatgaatttgctcgtctgg

SEQ ID NO: 886156 - DNA, 75 bp, synthetic construct
  source 1..75: mol_type = other DNA
atatgggcgactatcacctgaatcatcagcagggtgaaacctggctgcgggtgaaaggcgagaaagtgttgaacg

SEQ ID NO: 886157 - DNA, 75 bp, synthetic construct
  source 1..75: mol_type = other DNA
attgtcggttatgggatctgggggacgttactgggacgctatgttactggtgcctgtagtcggactggcaagtgc

SEQ ID NO: 886158 - DNA, 75 bp, synthetic construct
  source 1..75: mol_type = other DNA
atgatgtaccacattcccggtgtgttatcgccacaggacgtcgcccggtttcgtgcccaactggaacaagccgaa

SEQ ID NO: 886159 - DNA, 75 bp, synthetic construct
  source 1..75: mol_type = other DNA
gtgtcatgtatggatgttgataaaaaactacaggaactgaaaaacatgattgccgcgtggagagagcagaaatga

SEQ ID NO: 886160 - DNA, 75 bp, synthetic construct
  source 1..75: mol_type = other DNA
acctgcattcaggttgtgattgatggagagaaatgggttgcaggcgtcgagcctgaccgattgcaaggatgggag

SEQ ID NO: 886161 - DNA, 75 bp, synthetic construct
  source 1..75: mol_type = other DNA
ccggtttgtgctaaaagcgggcaatggtgagactatcctcaccagcgagctgtatacctcaaaagcctctgcgga

SEQ ID NO: 886162 - DNA, 75 bp, synthetic construct
  source 1..75: mol_type = other DNA
atcgtgagaaggaggttgttgctattgagtctcttgtgactcgtgctcgtactgaggtcgatcgtatatcaaaag

SEQ ID NO: 886163 - DNA, 75 bp, synthetic construct
  source 1..75: mol_type = other DNA
cagtgatgatcatctcccataaagagatgaaatcgtggttccgggaaattatcactgtcgaagttaaagaggggc

SEQ ID NO: 886164 - DNA, 75 bp, synthetic construct
  source 1..75: mol_type = other DNA
acaggcattgactgattggcatgagaaaaaaggccgtgtcgaacagcagcagcaacaaaaactacgtcagcaaca

SEQ ID NO: 886165 - DNA, 75 bp, synthetic construct
  source 1..75: mol_type = other DNA
ggcttattctaggcgtgctgaaatacccggcaagctactctgaggtagtcaacgagagcgcttacggccagctag

SEQ ID NO: 886166 - DNA, 75 bp, synthetic construct
  source 1..75: mol_type = other DNA
atagagaagctgaaaaagctgacgataaaaaaatgcgggtcattagcgactatgtttcaggtatgacggacgagt

SEQ ID NO: 886167 - DNA, 75 bp, synthetic construct
  source 1..75: mol_type = other DNA
cgctacggcgaaggagaagagatcctgtcgctactcaatctttatcataatctgctgcgggaatggtcggagatc

SEQ ID NO: 886168 - DNA, 75 bp, synthetic construct
  source 1..75: mol_type = other DNA
ataaactaaacatttattacatattgttgaaaagattatttggtattactgttaataaggttttaggagtgtcaa

SEQ ID NO: 886169 - DNA, 75 bp, synthetic construct
  source 1..75: mol_type = other DNA
tgcctttagttgtgacaaatgcacatgctgtatatgttgatgttcggcatgaataccttgatgatagtaaagcta

SEQ ID NO: 886170 - DNA, 75 bp, synthetic construct
  source 1..75: mol_type = other DNA
caatattcgacttctccttaacatttgatattatcgagacgttaatcactcatagcgaatcatcaatcgctaagg

SEQ ID NO: 886171 - DNA, 75 bp, synthetic construct
  source 1..75: mol_type = other DNA
attgttggttatgggatctggggaacactacttggacgctatgaaacctggcgggttgcaccgttatcgttattg

SEQ ID NO: 886172 - DNA, 75 bp, synthetic construct
  source 1..75: mol_type = other DNA
gttgcagtggtgggctgattatctcgactcctgccagacggcatatgtcgcgccctatgattttaagtggatcaa

SEQ ID NO: 886173 - DNA, 75 bp, synthetic construct
  source 1..75: mol_type = other DNA
atgtcccagactgagcgtcgccatgagcggctggcggttcggctgtccctcattatcagtcgccttgttgctggc

SEQ ID NO: 886174 - DNA, 75 bp, synthetic construct
  source 1..75: mol_type = other DNA
gcctggacgtacgtgacggccaggtcgtaaaaggcgtgcagttccgcaaccacgagatcatcggcgacatcgtcc

SEQ ID NO: 886175 - DNA, 75 bp, synthetic construct
  source 1..75: mol_type = other DNA
ggttgccatactgctatggctgaacgtacttaccctggcgggaccaagtttctccttgtggccagccggacaacc

SEQ ID NO: 886176 - DNA, 75 bp, synthetic construct
  source 1..75: mol_type = other DNA
atatcaggtgatgaattgttgatttttcccggcgaccactaccagataaagcccatgagcgaaaacaccattaac

SEQ ID NO: 886177 - DNA, 75 bp, synthetic construct
  source 1..75: mol_type = other DNA
gttgcaatggtgggctgattatctcgacacctgcaagacggcatatattgccccctatgattttaaatgggctaa

SEQ ID NO: 886178 - DNA, 75 bp, synthetic construct
  source 1..75: mol_type = other DNA
gtgtggtagataaaagctgggtatctcgcgtggcggaagtgatcgatattcccttctgcgttgctggcgggatta

SEQ ID NO: 886179 - DNA, 75 bp, synthetic construct
  source 1..75: mol_type = other DNA
gctgaaaaaagtgcgtgaagtttgccacgtcccgctgattgcctccggtggcgcgggcaccatggaacacttcct

SEQ ID NO: 886180 - DNA, 75 bp, synthetic construct
  source 1..75: mol_type = other DNA
gggccaggctggctgatgcataccgatgtactgaaccgcgaagtctgttttcacctgaacacgccgggaacgggg

SEQ ID NO: 886181 - DNA, 75 bp, synthetic construct
  source 1..75: mol_type = other DNA
tctttcctttggcgcggataaaatttccatcaactctcctgcgctggcggacccgacgttaattactcgcctggc

SEQ ID NO: 886182 - DNA, 75 bp, synthetic construct
  source 1..75: mol_type = other DNA
ccgttctgcgtagccggcggcattaaatccatcgacgatgcggcgcgcattctctcctttggggcggataaaatc

SEQ ID NO: 886183 - DNA, 75 bp, synthetic construct
  source 1..75: mol_type = other DNA
atccgacattgatcacccgtctggcagatcgttttggcgtgcagtgtattgtggtcggtattgatacctggtacg

SEQ ID NO: 886184 - DNA, 75 bp, synthetic construct
  source 1..75: mol_type = other DNA
cgacgggtggcgcaccggtagtgggtgatatgcccgcacaaactgcaccgccaacaacggcgaaccttaacgcct

SEQ ID NO: 886185 - DNA, 75 bp, synthetic construct
  source 1..75: mol_type = other DNA
tagtgcatccttacaccgtgcggtcagataaactgcctgaatacactactgatgtgaatcagttatatgatgctc

SEQ ID NO: 886186 - DNA, 75 bp, synthetic construct
  source 1..75: mol_type = other DNA
ggcgtttcccgatgggtaaatctgacttccgggtacacactttcgaagaagagattgaatttgttcaggggttaa

SEQ ID NO: 886187 - DNA, 75 bp, synthetic construct
  source 1..75: mol_type = other DNA
atgaaattgacgctaaaaaaccttagcatggcgatcatgatgagtggaatgatcatgggaagcagtgcaatggcg

SEQ ID NO: 886188 - DNA, 75 bp, synthetic construct
  source 1..75: mol_type = other DNA
ttgagaagttctcgcatttttcggtggcaaaaatggggcaaaacgctgcaaaaggggcaaaaatggggcaaaaaa

SEQ ID NO: 886189 - DNA, 75 bp, synthetic construct
  source 1..75: mol_type = other DNA
cgttgtggcaacgaatgctggcgcgtggctggacgccggtcagtgaatgccgtcttgacgactggcttacgcaag

SEQ ID NO: 886190 - DNA, 75 bp, synthetic construct
  source 1..75: mol_type = other DNA
cgccagacggcgtggtgttattaagcagcgatccgaaacgcacgccagaggtcagcgataatccggtaatgattg

SEQ ID NO: 886191 - DNA, 75 bp, synthetic construct
  source 1..75: mol_type = other DNA
tgaaagcggggggaagtatggcgatagaggccaacggtagcttatccataaaagccgctcaagtaaggatcgaca

SEQ ID NO: 886192 - DNA, 75 bp, synthetic construct
  source 1..75: mol_type = other DNA
tgacgcgaaggaaatcaccgcaactcagaaagaaatgacgcagaaactttctgagctttcggaaaagctggcaaa

SEQ ID NO: 886193 - DNA, 75 bp, synthetic construct
  source 1..75: mol_type = other DNA
gcgataaagtatgggtagaatttccctacaatggggattcgcgatggccattgataatcggttatgcacaggatg

SEQ ID NO: 886194 - DNA, 75 bp, synthetic construct
  source 1..75: mol_type = other DNA
cgggatgctaatacgttgtatgccgcaattgaaaacacgaacagcattgttgttttcgacctcggacaaaagaaa

SEQ ID NO: 886195 - DNA, 75 bp, synthetic construct
  source 1..75: mol_type = other DNA
atccgcacttatccatctcggtgcaaacgttgcgcctcttactttgtcgggtgaaccctggcgcttattgagcag

SEQ ID NO: 886196 - DNA, 75 bp, synthetic construct
  source 1..75: mol_type = other DNA
cggaacggactaatggaggtccggacggcgggcggagcctgggccgttacgcacttgaaaagtggaacaacaatc

SEQ ID NO: 886197 - DNA, 75 bp, synthetic construct
  source 1..75: mol_type = other DNA
tgggccgcgtcgaagataaatttgccaaaaacgtcgctcaggcgcgcggcacaccgggcgttgagtgcctctctc

SEQ ID NO: 886198 - DNA, 75 bp, synthetic construct
  source 1..75: mol_type = other DNA
cactgcttaacctgaaaacgggcgataccatcgacgtgggcgatgccactttgcggattgccggagaagtgattc

SEQ ID NO: 886199 - DNA, 75 bp, synthetic construct
  source 1..75: mol_type = other DNA
gctggcttaccagtttccgctgggagaatggcaacggcatgttgacgcaactcaaccgccagttcccgaccatta

SEQ ID NO: 886200 - DNA, 75 bp, synthetic construct
  source 1..75: mol_type = other DNA
atcatgatgaccggcaggctgctgtcggcactaacgttgtttacggcgctattcaccagtgtgggggtaaaacgg

SEQ ID NO: 886201 - DNA, 75 bp, synthetic construct
  source 1..75: mol_type = other DNA
atggcttccgacaatctggtcagtatctccattaacgatgactccctgcgccggagcctccgtgcgctggatctt

SEQ ID NO: 886202 - DNA, 75 bp, synthetic construct
  source 1..75: mol_type = other DNA
tggggcgtggtggcttcggtgacgccttccactaacccggcggcaaccgtaattaacaacgccatcagcctgatt

SEQ ID NO: 886203 - DNA, 75 bp, synthetic construct
  source 1..75: mol_type = other DNA
ggtggttgtgctactgctcgccggactgatgggcggcagtatgctgctctgggcggtgctggcgggcgcggtagt

SEQ ID NO: 886204 - DNA, 75 bp, synthetic construct
  source 1..75: mol_type = other DNA
tattgcatagcgtaaccgccgaaagcgaagagccactgagcgccgggcaaattaaacgcattgaaacgctgatgc

SEQ ID NO: 886205 - DNA, 75 bp, synthetic construct
  source 1..75: mol_type = other DNA
agaactggctgaagaagtgcggttttgttgatatccgcattgcggatgtgagcgttaccactacggaagagcagc

SEQ ID NO: 886206 - DNA, 75 bp, synthetic construct
  source 1..75: mol_type = other DNA
accacgttgtggtgtgagttcgccatgctcgggtttgtttccggcctggtggccgcaattggtgcggaaacggca

SEQ ID NO: 886207 - DNA, 75 bp, synthetic construct
  source 1..75: mol_type = other DNA
ctgaatgtacttcgccgcatgacgctgaaatcgctacctctgcgcctggcggttagccgcctgttacgtcagccg

SEQ ID NO: 886208 - DNA, 75 bp, synthetic construct
  source 1..75: mol_type = other DNA
gccagctttcggcattttcgctctcctttatgctgctggcactgttgctggtgttgcgtggcgatctgctcgacc

SEQ ID NO: 886209 - DNA, 75 bp, synthetic construct
  source 1..75: mol_type = other DNA
atgtgtattaaagctgaaaaatatattgaatgggttaaacactgtcagtgccacggggtgccgctgacgacatat

SEQ ID NO: 886210 - DNA, 75 bp, synthetic construct
  source 1..75: mol_type = other DNA
actgaaattacttggtcttcgcttgatcagcgagggctacagcgtggtcacggcggaaagcggcgctgaggggct

SEQ ID NO: 886211 - DNA, 75 bp, synthetic construct
  source 1..75: mol_type = other DNA
acagcaaaccatttattgctattaactgtggcgcattgcccgagcagttgctggagtcggagctgtttggtcatg

SEQ ID NO: 886212 - DNA, 75 bp, synthetic construct
  source 1..75: mol_type = other DNA
acgggtactgaatcgcgaaaaagtagatttagtcatcagcgacctgcggatggatgaaatggacggtatgcagct

SEQ ID NO: 886213 - DNA, 75 bp, synthetic construct
  source 1..75: mol_type = other DNA
atgaaaaaagctggcctgtcaatcagtcgtgtgttgtgcggcgacgaaagcgagatccgcatagaaattaaattt

SEQ ID NO: 886214 - DNA, 75 bp, synthetic construct
  source 1..75: mol_type = other DNA
aattagtgatgcgctggtggagcaggcgctggagggcgaaaacacggcgctgccaacctttgttgaggcgcgtaa

SEQ ID NO: 886215 - DNA, 75 bp, synthetic construct
  source 1..75: mol_type = other DNA
gttgcgccaggcggcagagcgacataaaccgtttgtccgcgcgttctccaccgatgcaatgaaacgcctgatgac

SEQ ID NO: 886216 - DNA, 75 bp, synthetic construct
  source 1..75: mol_type = other DNA
ccacggggtgccgctgacgacatataaatgccccggatgcggtgaacagattatgacgcaatgctcacccgaaaa

SEQ ID NO: 886217 - DNA, 75 bp, synthetic construct
  source 1..75: mol_type = other DNA
ttgaatgggttaaacactgtcagtgccacggggtgccgctgacgacatataaatgccccggatgtggtgaacaga

SEQ ID NO: 886218 - DNA, 75 bp, synthetic construct
  source 1..75: mol_type = other DNA
tgtccgtggtgtagtggtgttttctttaaacaggtagaaggcgcgaaaataaaggtcagcgcagttattcagaat

SEQ ID NO: 886219 - DNA, 75 bp, synthetic construct
  source 1..75: mol_type = other DNA
gtttttcccagacttcacaaatccataaaaagacagccatatcaaagggcaacagcgttatgtatcgcacaaacg

SEQ ID NO: 886220 - DNA, 75 bp, synthetic construct
  source 1..75: mol_type = other DNA
gaacgatccgggtattctggttacgcaatccgtacataaacagcaggctggtttttctcaaacttcacaaatcca

SEQ ID NO: 886221 - DNA, 75 bp, synthetic construct
  source 1..75: mol_type = other DNA
ttgaatgggttaaacgggtacagaataacaatgtgcctctgactgcatttaattgccccaaatgcaaagagcaaa

SEQ ID NO: 886222 - DNA, 75 bp, synthetic construct
  source 1..75: mol_type = other DNA
ggggatcatgatcgacgatattgtcgccggggtgatttccgcaggcatcctgtattttatcggtcatcactggcc

SEQ ID NO: 886223 - DNA, 75 bp, synthetic construct
  source 1..75: mol_type = other DNA
taaaagtattgctgcgattattgagcagatcgatttcaaattaactgagcagatcaaactaatcctgagtcatcc

SEQ ID NO: 886224 - DNA, 75 bp, synthetic construct
  source 1..75: mol_type = other DNA
tatgaagctgaatatggacagttaggtggagaaccttacggttgtattattgcggattattattttgatcacacg

SEQ ID NO: 886225 - DNA, 75 bp, synthetic construct
  source 1..75: mol_type = other DNA
atcgcaaaaactctgattacgccgcctttattggcgcacaatcgctacagaagccgcaggaatattacgatccag

SEQ ID NO: 886226 - DNA, 75 bp, synthetic construct
  source 1..75: mol_type = other DNA
gtgatcataccaatgggatcgcctggcgtttaatctctcagggcgagatgtatctggatttgcccctatatttcc

SEQ ID NO: 886227 - DNA, 75 bp, synthetic construct
  source 1..75: mol_type = other DNA
gtcgcaaaataaacaagagctgaaagcaacacagaatgaactgggagtatataaatcccgactttcgacattaca

SEQ ID NO: 886228 - DNA, 75 bp, synthetic construct
  source 1..75: mol_type = other DNA
aacgtctcacttcggtcaatcgtaccaatggtactgcggatctcttggtcccgctactgcgggaactcgccaagg

SEQ ID NO: 886229 - DNA, 75 bp, synthetic construct
  source 1..75: mol_type = other DNA
acggttgcgcgccaccttcgtgaaggaaggcatcccgccggaatttctgtcacattacctgcctgatgcaccctt

SEQ ID NO: 886230 - DNA, 75 bp, synthetic construct
  source 1..75: mol_type = other DNA
ctgacgggaatattactgctgagtggtcgacgatggatgtcactaaaaaaggtgagtatcgcgacaaattcgtaa

SEQ ID NO: 886231 - DNA, 75 bp, synthetic construct
  source 1..75: mol_type = other DNA
tccagtaagtctaccttcaagtccttaaaagatgagttgaaggctattcaggaacaaacgttgctattggaaaaa

SEQ ID NO: 886232 - DNA, 75 bp, synthetic construct
  source 1..75: mol_type = other DNA
aatgtatcgtgcgcgacaagatcggctcgttcaaagagcgtgaagatatgcagcgctggctcaatgagtggatca

SEQ ID NO: 886233 - DNA, 75 bp, synthetic construct
  source 1..75: mol_type = other DNA
atggtaaacgatactcttctggcgactggcgacctctctactgcgcaaaccactgcctatcaggaaacggagttt

SEQ ID NO: 886234 - DNA, 75 bp, synthetic construct
  source 1..75: mol_type = other DNA
ggagcggcatcgagccggaccggctgcgttgcatgagtttcgccggctgggtgccttggctactggacagccttg

SEQ ID NO: 886235 - DNA, 75 bp, synthetic construct
  source 1..75: mol_type = other DNA
gccttttgtctttttctattattacagcattgtttccgttgaacgcgatggcaacaaaattaaccatagagcagc

SEQ ID NO: 886236 - DNA, 75 bp, synthetic construct
  source 1..75: mol_type = other DNA
catctgcccgtatccgcaccagtcgttcggaaaatgattcaaacaccgtacggaaaaaatattaccagtgtaaca

SEQ ID NO: 886237 - DNA, 75 bp, synthetic construct
  source 1..75: mol_type = other DNA
tgggcggctaatggcgtcgattttagccagtcgccggaagtatccgggacacaggaaggggccattcggatgcca

SEQ ID NO: 886238 - DNA, 75 bp, synthetic construct
  source 1..75: mol_type = other DNA
cccgcatagcgttgaaggttatcaggtaacgaccaataccaaccgctgcttgcagtgccacggtgtcgaaagtta

SEQ ID NO: 886239 - DNA, 75 bp, synthetic construct
  source 1..75: mol_type = other DNA
atgaccattttgccacgccataaagatgtcgcgaaaagtcgcctgaaaatgagtaacccatggcacttattggct

SEQ ID NO: 886240 - DNA, 75 bp, synthetic construct
  source 1..75: mol_type = other DNA
acgctcatggcgctgccgaccaatgactggcagtgggttgccgccgggtttgtgattttccgtattctggatatg

SEQ ID NO: 886241 - DNA, 75 bp, synthetic construct
  source 1..75: mol_type = other DNA
tcgcggtgcgaaaacgcgtcctcttgaagcgtttattcaactgctcgatgtgcctgactcagcaaaacagtcttc

SEQ ID NO: 886242 - DNA, 75 bp, synthetic construct
  source 1..75: mol_type = other DNA
caacgcgaggttttttacccttcgcgccagaggcagacttctgggtaggcaaacataaactcccgcaatatgaga

SEQ ID NO: 886243 - DNA, 75 bp, synthetic construct
  source 1..75: mol_type = other DNA
agcgggttctctgggacgttttggtaacgagatgagcggttggtttgacctgaccttaaatcagcgtgtttataa

SEQ ID NO: 886244 - DNA, 75 bp, synthetic construct
  source 1..75: mol_type = other DNA
aacggcaaatgcggtcgttacctatgatggcaacgtaggtgagcagtataacgatgcctggtttggtgacagtgc

SEQ ID NO: 886245 - DNA, 75 bp, synthetic construct
  source 1..75: mol_type = other DNA
atgaaaagccatgacctgaagaaagcgctgtgtcaatggacggcgatgctggccctggtggtaagcggcgcggtt

SEQ ID NO: 886246 - DNA, 75 bp, synthetic construct
  source 1..75: mol_type = other DNA
gccttgcttacgatggaaacaacagaaatacacacagtaatcttaaacaaaatgaaagaacgaggtgaaatatga

SEQ ID NO: 886247 - DNA, 75 bp, synthetic construct
  source 1..75: mol_type = other DNA
ccctggatatgtattatgcatcagagacggaaaatggagacaaagttgcaaaaattacaattgtgctacgcgata

SEQ ID NO: 886248 - DNA, 75 bp, synthetic construct
  source 1..75: mol_type = other DNA
ttttgactctgtaaaatttattctgaccaccgctctcgccgctggtctgctggctcttcccgtgcagataagaac

SEQ ID NO: 886249 - DNA, 75 bp, synthetic construct
  source 1..75: mol_type = other DNA
gtcatttttgtggcaatctgccaaatacgacccatttccatgagcaaaccgtggagttcccgatccagggagaga

SEQ ID NO: 886250 - DNA, 75 bp, synthetic construct
  source 1..75: mol_type = other DNA
gcgcttcagaaggggaccggtgcaggaaatatcagtgccctgaacaaagtaatgaagggtacgctggtgacatct

SEQ ID NO: 886251 - DNA, 75 bp, synthetic construct
  source 1..75: mol_type = other DNA
ggtgaaattaattgggagctggatgatggttctcgcatggtattgaaggcagaaaagcaggagccaccacagtga

SEQ ID NO: 886252 - DNA, 75 bp, synthetic construct
  source 1..75: mol_type = other DNA
gtgggccggcgttacgagggcgagattattcaaagcgatcgtccaggagaaaatattcttttgtttaaacgtgcg

SEQ ID NO: 886253 - DNA, 75 bp, synthetic construct
  source 1..75: mol_type = other DNA
tgccatcagccagacactggaagaacaaccggtgctcaacagtaaatcgtggctgaccagtttgcaaaacgatta

SEQ ID NO: 886254 - DNA, 75 bp, synthetic construct
  source 1..75: mol_type = other DNA
gctgtatcaggaaaaattgccggagcgctggttgaagaagatcgcgtcaaaattctggcaatgattcaggagcag

SEQ ID NO: 886255 - DNA, 75 bp, synthetic construct
  source 1..75: mol_type = other DNA
ctggcagggttcatattgctgtgtctgttcggcccggctttactggctggctatatcactgaacgcataacccgg

SEQ ID NO: 886256 - DNA, 75 bp, synthetic construct
  source 1..75: mol_type = other DNA
gttatacgggcggcaggcaaacacgcctgtgcgctcgtttatgttccgtcaggaaggacgcgaagcgctgggctt

SEQ ID NO: 886257 - DNA, 75 bp, synthetic construct
  source 1..75: mol_type = other DNA
ccagcaactccaccggctcagtgttgttcagggtatgctgaagcacattgatttttcgactgccagcccgactgt

SEQ ID NO: 886258 - DNA, 75 bp, synthetic construct
  source 1..75: mol_type = other DNA
cgcgcattgagcaaaaaagcgtggcccggcgtgtggaccaactcggtttgcggccacccacagcaaggagaaagt

SEQ ID NO: 886259 - DNA, 75 bp, synthetic construct
  source 1..75: mol_type = other DNA
aacgaagacgcggtgatccgccgttgccgttatgagcttggcgtagaaattacgcctcctgaatctatctatcct

SEQ ID NO: 886260 - DNA, 75 bp, synthetic construct
  source 1..75: mol_type = other DNA
actcaggcctcagtggcatggttgtttacagatccggagtctcaactgtttgaggcgtggttcagagacaccatc

SEQ ID NO: 886261 - DNA, 75 bp, synthetic construct
  source 1..75: mol_type = other DNA
cagtctgtccttgtggggagtaaaagtcgacacgaaatatatggcgagtaagcccattgaaaaaaatatccccgg

SEQ ID NO: 886262 - DNA, 75 bp, synthetic construct
  source 1..75: mol_type = other DNA
aatgatgtaacacaggtatataatgatgaactcactgttgatgtgatagaatccaatggcgttattcgaacattt

SEQ ID NO: 886263 - DNA, 75 bp, synthetic construct
  source 1..75: mol_type = other DNA
tgttaggttgtgtttttattgttgttacatattcctcttatgccgcatcaagtgataacgcaacctttgatccta

SEQ ID NO: 886264 - DNA, 75 bp, synthetic construct
  source 1..75: mol_type = other DNA
aagaagaagacgctcaggatgtgaaaaagatcattgaagaatgcggacgcaaagccgtcctgctgccaggcgatt

SEQ ID NO: 886265 - DNA, 75 bp, synthetic construct
  source 1..75: mol_type = other DNA
caggacaaccggcggagctggccccagtgtatgtttatctggcaagtcaggagtcgagctatgtcaccgcagaag

SEQ ID NO: 886266 - DNA, 75 bp, synthetic construct
  source 1..75: mol_type = other DNA
cgcaacgcgtccggcggtgatgtcgctggtaatctggagcgcattaatcccaatcattcccttctttgttgcctc

SEQ ID NO: 886267 - DNA, 75 bp, synthetic construct
  source 1..75: mol_type = other DNA
atgtggggacttgatggtaaacatatcgcgctggaggctcacacctttgactctgtgaaatttattctgaccacc

SEQ ID NO: 886268 - DNA, 75 bp, synthetic construct
  source 1..75: mol_type = other DNA
tttttcgactgccagcccgactgttcgactggctcttcagaaggggaccggtgcaggaaatatcagtgccctgaa

SEQ ID NO: 886269 - DNA, 75 bp, synthetic construct
  source 1..75: mol_type = other DNA
attacccggaatggatagtcggaagttcgttgcttgatatcgccctgaataaggagtggccgaatcatgacgcag

SEQ ID NO: 886270 - DNA, 75 bp, synthetic construct
  source 1..75: mol_type = other DNA
gcgccgggcccgttcacagactgccacggtttgcaccatagctgacatgaccgtcgatatggtgcggcggacagt

SEQ ID NO: 886271 - DNA, 75 bp, synthetic construct
  source 1..75: mol_type = other DNA
tcagtccctgcttcttctggacaggcttaatgagctggatctggatcatgaggctgatttctgcgagaaactcca

SEQ ID NO: 886272 - DNA, 75 bp, synthetic construct
  source 1..75: mol_type = other DNA
aattgcaaaaatgctaaagacggcttatttagatataagcaattacatcctaaacacgttgactataaagatgca

SEQ ID NO: 886273 - DNA, 75 bp, synthetic construct
  source 1..75: mol_type = other DNA
caaagtgattgtctcgcgcgccattcccctgccatcgcggattgatatgcccgccacgcttgttatacgggcggc

SEQ ID NO: 886274 - DNA, 75 bp, synthetic construct
  source 1..75: mol_type = other DNA
ccagggcggagacagctccgctggctccgttcacgacagcccgccccgccagggggacgcccggaaaaggcataa

SEQ ID NO: 886275 - DNA, 75 bp, synthetic construct
  source 1..75: mol_type = other DNA
acggtcgctgcaagccgggggttttgcgtcagggatggaagcccgccagggcggagacagctccgctggctccgt

SEQ ID NO: 886276 - DNA, 75 bp, synthetic construct
  source 1..75: mol_type = other DNA
aaactgcgcagtcatggcgttactgtcgtggaatatgagcaagattatggtgttgccgtcgaggaaggacgtaaa

SEQ ID NO: 886277 - DNA, 75 bp, synthetic construct
  source 1..75: mol_type = other DNA
ggctgaccgtgcgaccttcgttgttgacccgcagggtataatccaggcaatcgaagttaccgctgaaggcattgg

SEQ ID NO: 886278 - DNA, 75 bp, synthetic construct
  source 1..75: mol_type = other DNA
cggagatccgccgtggcgagtatgtcaaagtgattgtctcgcgcgccattcccctgccatcgcggattgatatgc

SEQ ID NO: 886279 - DNA, 75 bp, synthetic construct
  source 1..75: mol_type = other DNA
gcgaccgttccggtcgctgcaaacccgggtttttgcgtcagggatggaagcccgccagggcggagacagctccgc

SEQ ID NO: 886280 - DNA, 75 bp, synthetic construct
  source 1..75: mol_type = other DNA
gacccgcagggtataatccaggcaatcgaagttaccgctgaaggcattggccgtgacgcgtctgacctgctgcgt

SEQ ID NO: 886281 - DNA, 75 bp, synthetic construct
  source 1..75: mol_type = other DNA
aagatgcgcctcatcccagaattaaacaattagcgagatttgcgcatacacatcccggaggcccgtcatgtcact

SEQ ID NO: 886282 - DNA, 75 bp, synthetic construct
  source 1..75: mol_type = other DNA
tcatatcgacagcgtatttggtccaggtgaaagtaagttacacggttatcctggtcacccggaaattgaactggc

SEQ ID NO: 886283 - DNA, 75 bp, synthetic construct
  source 1..75: mol_type = other DNA
ttccggctatgcaaaaacggctggaaaaggaatatcaacaaccgatcagcgggcaactgctactgaaaaaagata

SEQ ID NO: 886284 - DNA, 75 bp, synthetic construct
  source 1..75: mol_type = other DNA
tcctgaaacggctgcctctggagggattattgaatcagaactggttgccattccggctatgcaaaaacggctgga

SEQ ID NO: 886285 - DNA, 75 bp, synthetic construct
  source 1..75: mol_type = other DNA
catttcagcgcggcagcccgtcgagggattatttctaacaggtttgtagaagcaattttgcagttttggcgcgaa

SEQ ID NO: 886286 - DNA, 75 bp, synthetic construct
  source 1..75: mol_type = other DNA
aaaccactggtggtcagtatcatcaggcaacgccccgtcatggaatatgatgcatcccatctcggcaatatggtt

SEQ ID NO: 886287 - DNA, 75 bp, synthetic construct
  source 1..75: mol_type = other DNA
cagactggtcagcggaacagagatccagacgaaatattgttcaactgcagcccgtagcgtcggtgcggcattcga

SEQ ID NO: 886288 - DNA, 75 bp, synthetic construct
  source 1..75: mol_type = other DNA
ctacgctgcactcctgatgtccgagcagaaggagatcgatgtgctggtgactggcctgcctgttagtcagtacat

SEQ ID NO: 886289 - DNA, 75 bp, synthetic construct
  source 1..75: mol_type = other DNA
tcaggaaatttatgaacgcccctacaacagttttatttccgatgcaacggcgaatggtctgattctcatgaaact

SEQ ID NO: 886290 - DNA, 75 bp, synthetic construct
  source 1..75: mol_type = other DNA
gagctggcaaaagctgcgcagcctgacgcgtcgtcggcgcttcgcgcgcccgctggccgcattcttatttatcgc

SEQ ID NO: 886291 - DNA, 75 bp, synthetic construct
  source 1..75: mol_type = other DNA
accaccgacaacggcatctttggcctgttctatggcatctcgccaagttatatggatggcattctgtcgacccgc

SEQ ID NO: 886292 - DNA, 75 bp, synthetic construct
  source 1..75: mol_type = other DNA
cccggttcgggaccatcgaatcggtcacttatgatattgccgagggttcggttgtcagtctggcggccggaggga

SEQ ID NO: 886293 - DNA, 75 bp, synthetic construct
  source 1..75: mol_type = other DNA
tcctgctgatagcaggatttgccattcttcgccttttgttcagagcattaatcagcacagcttctgcgctggcag

SEQ ID NO: 886294 - DNA, 75 bp, synthetic construct
  source 1..75: mol_type = other DNA
agatcacgccaaaacgttcggtggcggttaagtctgtggtggttgtgccccaacctgctggagcttacatggatg

SEQ ID NO: 886295 - DNA, 75 bp, synthetic construct
  source 1..75: mol_type = other DNA
cggagatctgagggaatttgaactggcagacggaaactggctactggacaatgcctggtatgaaagaaacatggc

SEQ ID NO: 886296 - DNA, 75 bp, synthetic construct
  source 1..75: mol_type = other DNA
gggacggatctccggtacgcagttcatcaggaatcttgccgtggcatcttccggtgtggcaggtggagctgtcgg

SEQ ID NO: 886297 - DNA, 75 bp, synthetic construct
  source 1..75: mol_type = other DNA
tggctcttcccgtgcagataagaaccattcagcagaacgggctcacacctgaagatatcagcaaggaaattaacg

SEQ ID NO: 886298 - DNA, 75 bp, synthetic construct
  source 1..75: mol_type = other DNA
gctgcattagtgacgctgctatgggcggccagccagatccaggcgctgaaaaaactgaccagtgccatccgccag

SEQ ID NO: 886299 - DNA, 75 bp, synthetic construct
  source 1..75: mol_type = other DNA
ctggattggcgagacgcgactggaaggtgacgaagctacgctgactcgccgtgccgctgaactgggggtacgcgc

SEQ ID NO: 886300 - DNA, 75 bp, synthetic construct
  source 1..75: mol_type = other DNA
ttgttacagcacggtacgttctcgcaggagtttcactcgccggtcaatgtggatgagctgatgtccgccattctg

SEQ ID NO: 886301 - DNA, 75 bp, synthetic construct
  source 1..75: mol_type = other DNA
tgctgaaacgcggcattggctatacgccagaaaaccgcaaagaagcggggatcattccctggttgggcgttgacg

SEQ ID NO: 886302 - DNA, 75 bp, synthetic construct
  source 1..75: mol_type = other DNA
ctgttacaggcgggttaactggttcattgaatggtaatgcagctacagccacaaaactgcaaacagcatgcacca

SEQ ID NO: 886303 - DNA, 75 bp, synthetic construct
  source 1..75: mol_type = other DNA
atggctaatctacgcaaagaagcgcgcggaagagaatgtcaggtgcgtatttacggcgtatgcaatggcaatcct

SEQ ID NO: 886304 - DNA, 75 bp, synthetic construct
  source 1..75: mol_type = other DNA
aacagggcgaaattgttatcaacggcgagaaaatcacgcgccccgattacggcgacatgctgaaacgcggcattg

SEQ ID NO: 886305 - DNA, 75 bp, synthetic construct
  source 1..75: mol_type = other DNA
atgatgacaaacctacgcaaagaagcgcgcggcagagaatgccaggtacggatttatggcgtatgcaatggcaac

SEQ ID NO: 886306 - DNA, 75 bp, synthetic construct
  source 1..75: mol_type = other DNA
atatatggctttgatgaaaactttcaaggtcatgggtatgaagattttgattttctgatacgtttatataaccat

SEQ ID NO: 886307 - DNA, 75 bp, synthetic construct
  source 1..75: mol_type = other DNA
ccgttccgtgaggttaagcggttacgtgaagctgttacagaaatggcttttttgtccagtgaagagattacgcgg

SEQ ID NO: 886308 - DNA, 75 bp, synthetic construct
  source 1..75: mol_type = other DNA
tggaagaaattcgccgcattgcctcctgtgccaccgttatgcgcgatggtcaggtggcgggcgatgtgatgctcg

SEQ ID NO: 886309 - DNA, 75 bp, synthetic construct
  source 1..75: mol_type = other DNA
aagttgaactggtgatcagcgccgtgaaaaaaatgtcagcactgggcgtggcggtgatttatgtcagccaccgga

SEQ ID NO: 886310 - DNA, 75 bp, synthetic construct
  source 1..75: mol_type = other DNA
tctcgacaacaaagacgccagactttaccacctcgaaggcgtgatcaggacgcaggcggtattgctgaaggaggg

SEQ ID NO: 886311 - DNA, 75 bp, synthetic construct
  source 1..75: mol_type = other DNA
gcaagacatgccgtgctgtatccgctgaaatttggctcctgtatgcgggaagttaacctctggggatgtccttat

SEQ ID NO: 886312 - DNA, 75 bp, synthetic construct
  source 1..75: mol_type = other DNA
ggaatctttatggatttatggaggctcgcgaatgacgaaagctgtctgcgccatcaggccttctggcatagctgg

SEQ ID NO: 886313 - DNA, 75 bp, synthetic construct
  source 1..75: mol_type = other DNA
caatggctatatctgccagggctttaaccctgttgcctcattcccgaacaaaaacaaagtgatcggctgtctgtc

SEQ ID NO: 886314 - DNA, 75 bp, synthetic construct
  source 1..75: mol_type = other DNA
caaccggccccggtatgcctgaaatgaatgaaaaggtaagggtgttgaaccctgtcgcctgtatgcgctcgcgct

SEQ ID NO: 886315 - DNA, 75 bp, synthetic construct
  source 1..75: mol_type = other DNA
tcatcgaggcgtcatttgctgacggtctatttgaagatgttgctgccgcctttgaagaaatccgcaccgcagaag

SEQ ID NO: 886316 - DNA, 75 bp, synthetic construct
  source 1..75: mol_type = other DNA
gagcctgatggatcagtattcagcaaatatcaattactggaggaggatggtacctccacgcggatgcgtacccac

SEQ ID NO: 886317 - DNA, 75 bp, synthetic construct
  source 1..75: mol_type = other DNA
tcctgctgaccggacatgagattgaaaatctgaacgagaatctggcccgtgttatcgatcagaatgctctggaga

SEQ ID NO: 886318 - DNA, 75 bp, synthetic construct
  source 1..75: mol_type = other DNA
catcttccggtgtggcagggggtgctgtcggggcagtggcggggggggggacgtgttcagtccactgggaccatt

SEQ ID NO: 886319 - DNA, 75 bp, synthetic construct
  source 1..75: mol_type = other DNA
accagcacagcgtctgcgctggcagggttcgtattgctgtgtctgttcggcccggctttactggctggctatatc

SEQ ID NO: 886320 - DNA, 75 bp, synthetic construct
  source 1..75: mol_type = other DNA
ccgcagatccgcagggtaacccgtgggatccgaagcgtcagttgctgaaatgggacggcactaagtggaccggct

SEQ ID NO: 886321 - DNA, 75 bp, synthetic construct
  source 1..75: mol_type = other DNA
ctcggctggacgcaacactccgttggtgcgcaaaacattcgtacgatggcgatgatccagctgctgctcggcaat

SEQ ID NO: 886322 - DNA, 75 bp, synthetic construct
  source 1..75: mol_type = other DNA
attttgctcgcctggcgcgagatggtggttacaccatcgcacaatatgccgccgagtttaatctcaacccaaaca

SEQ ID NO: 886323 - DNA, 75 bp, synthetic construct
  source 1..75: mol_type = other DNA
gtggcggattcggtcgtgcctctgattaaaacccgtcgaacggggttattgtatcaggttgattatctgaagttc

SEQ ID NO: 886324 - DNA, 75 bp, synthetic construct
  source 1..75: mol_type = other DNA
gatgacagtaccaaacttagtctgccgcttaatcagcgtaaattagttgcacggcgcgcactatacgaaatgcgt

SEQ ID NO: 886325 - DNA, 75 bp, synthetic construct
  source 1..75: mol_type = other DNA
ggtcgcccgggaagaaggttgtgctgatgactttattctgacggtagaaacaggtccgattggcggaattacttc

SEQ ID NO: 886326 - DNA, 75 bp, synthetic construct
  source 1..75: mol_type = other DNA
ctttatttccggcgatttcacgctcgatgacagcaccaaactgaccctccccctcaaccagcgtaaactggttgc

SEQ ID NO: 886327 - DNA, 75 bp, synthetic construct
  source 1..75: mol_type = other DNA
atgcctgcttgtgagcttcgcccggccacgcagtacgacgcggtttacgcgctgatttgcgagctaaaacaggcg

SEQ ID NO: 886328 - DNA, 75 bp, synthetic construct
  source 1..75: mol_type = other DNA
tcagtgccacttcgaagaaaatcattttctgcggcacattaactgcgggcagtttaaaaacagaaattaccgacg

SEQ ID NO: 886329 - DNA, 75 bp, synthetic construct
  source 1..75: mol_type = other DNA
tcggtattgctgacggcattggcctggtcgcccgagaagaaggttgtgctggtgatgctgccaacttactgattt

SEQ ID NO: 886330 - DNA, 75 bp, synthetic construct
  source 1..75: mol_type = other DNA
ctgaaattgccggggattatcgtatgattctggatgaatccggtgtgatgcctgaccccatgatggttcgtgatt

SEQ ID NO: 886331 - DNA, 75 bp, synthetic construct
  source 1..75: mol_type = other DNA
cgcagtattacactggtgaatatcccaaacagaaacaaccgacgccaggcatccaggcgaagatgacaccggtgc

SEQ ID NO: 886332 - DNA, 75 bp, synthetic construct
  source 1..75: mol_type = other DNA
aacccaggaagcgatccccctgctaccgaaaggtgcaagtatcatcaccacttcgtcaatccaggcataccagcc

SEQ ID NO: 886333 - DNA, 75 bp, synthetic construct
  source 1..75: mol_type = other DNA
atgcgcgccgaggtgcagcggcattatccgcacatctggcaggagctggaggggctggcgcagggactggaggcc

SEQ ID NO: 886334 - DNA, 75 bp, synthetic construct
  source 1..75: mol_type = other DNA
aggcacttaccagttttcggaatgcccgtattctgtgggccggacatagtgagagccgaaaagccgttgaacaac

SEQ ID NO: 886335 - DNA, 75 bp, synthetic construct
  source 1..75: mol_type = other DNA
gccagagctcttacacccctgcacaacaactgcgctttcagcaacgtctggattacattaacggcatgcaggagt

SEQ ID NO: 886336 - DNA, 75 bp, synthetic construct
  source 1..75: mol_type = other DNA
ctgcacgcgcagcatttagcatgaatgtgcgaacgtttgtgctggtaaaggataaaaaaagcttctgctcatctg

SEQ ID NO: 886337 - DNA, 75 bp, synthetic construct
  source 1..75: mol_type = other DNA
gttatacctatatcgtcagaactggagtgcatgattaaaacaaaggccactggtcgtttaatttatccaagttat

SEQ ID NO: 886338 - DNA, 75 bp, synthetic construct
  source 1..75: mol_type = other DNA
gcaaattttgtgtggacgtgcggccagctggatcagaaggaaaaagattcaggcggcgatttgatactcgtggtg

SEQ ID NO: 886339 - DNA, 75 bp, synthetic construct
  source 1..75: mol_type = other DNA
gggaagattaataaaacccagttatgcaactgtcaggagtgcgataaggagtgttcgacctgatttgccagtcgg

SEQ ID NO: 886340 - DNA, 75 bp, synthetic construct
  source 1..75: mol_type = other DNA
tggattgaaaaaccagcagaccgaagaagaattaccgaacttttggaacgttggtggatatatcacggcaagatg

SEQ ID NO: 886341 - DNA, 75 bp, synthetic construct
  source 1..75: mol_type = other DNA
atataatcgcactgcaacagattctggggcatgcgagcattcagcagacgatggcctatgcgcaccttgcgcctg

SEQ ID NO: 886342 - DNA, 75 bp, synthetic construct
  source 1..75: mol_type = other DNA
ggactgccgccactggcggaggccaaccctgaaatgacgttcctggaaaaagcagaaatcgaaaaactgttaaat

SEQ ID NO: 886343 - DNA, 75 bp, synthetic construct
  source 1..75: mol_type = other DNA
tggcgtcacccggtagtgggtgaaattcccccggacgccttcattcactatgccgaatcgcaaaagatgattgta

SEQ ID NO: 886344 - DNA, 75 bp, synthetic construct
  source 1..75: mol_type = other DNA
ttgatgaacgtccgtgagttaaccggcacgccggtacgtgaaaccaaaattgcaggccttccgctgaccgttcgg

SEQ ID NO: 886345 - DNA, 75 bp, synthetic construct
  source 1..75: mol_type = other DNA
caatctgacgccttcactcttctatagctcacggcaggaagattacgatggtgtcgccctcattattggtaatac

SEQ ID NO: 886346 - DNA, 75 bp, synthetic construct
  source 1..75: mol_type = other DNA
gtactgctacgctggcggcatcctgtcgcgggagaaattccccggatgccttcattaactttgccgaatcgcaaa

SEQ ID NO: 886347 - DNA, 75 bp, synthetic construct
  source 1..75: mol_type = other DNA
agctcacaccaggaagatttcgatggtatcgccctcatcattggcaataccgcgatatcaacctttgcttcgcat

SEQ ID NO: 886348 - DNA, 75 bp, synthetic construct
  source 1..75: mol_type = other DNA
tattacccggcaccccaatggtgcctaacaaaccagccatcgttatctggtatcgcaaccctctgttgaagaata

SEQ ID NO: 886349 - DNA, 75 bp, synthetic construct
  source 1..75: mol_type = other DNA
gtgttactgatgttgccgatcgtttcccggatcgggcgcgcaaagacggtcgttactacgcgatagatttcacgc

SEQ ID NO: 886350 - DNA, 75 bp, synthetic construct
  source 1..75: mol_type = other DNA
aatcctacatcgaaatgctgatgccggaatctgttctgggtcgtctgggtgtgactgtttacagtggcttgaatg

SEQ ID NO: 886351 - DNA, 75 bp, synthetic construct
  source 1..75: mol_type = other DNA
gcaaaatcaagaaatggtggtattagatgaaattctggtacatacaccggaagcggttgatctgtctcgtctgaa

SEQ ID NO: 886352 - DNA, 75 bp, synthetic construct
  source 1..75: mol_type = other DNA
tggcgggcttacttagcgtctctacacttgcggttgctgcagagtcttcgccagaggcgttacgaattggctatc

SEQ ID NO: 886353 - DNA, 75 bp, synthetic construct
  source 1..75: mol_type = other DNA
cgttccgcgtatctgggtagacctggacttcaccgtagttcagccggaagctctgaaagttcttcacatctccgc

SEQ ID NO: 886354 - DNA, 75 bp, synthetic construct
  source 1..75: mol_type = other DNA
catcaccattggtgagtggggcggtctggaactggatatggacgacactacctaccgtgcacagtctgctatcgt

SEQ ID NO: 886355 - DNA, 75 bp, synthetic construct
  source 1..75: mol_type = other DNA
ggtctggaactggatatggatgacactacctaccgtgcacagtctgctatcgttccgcgtatctgggtagacctg

SEQ ID NO: 886356 - DNA, 75 bp, synthetic construct
  source 1..75: mol_type = other DNA
aagccattcgtgaactgggcgcggagcgtattggtcatggtgtgaaagcgattgaagatcgggcgctgatggatt

SEQ ID NO: 886357 - DNA, 75 bp, synthetic construct
  source 1..75: mol_type = other DNA
tttagccggtgatgagcttggtttcccggggagtctgttcctttctcacttcaatcgcgcgcgtgatgcaggctg

SEQ ID NO: 886358 - DNA, 75 bp, synthetic construct
  source 1..75: mol_type = other DNA
actttattgatgggattatggtttggtccagtatggggtatttgtatgtggttttcttcatggaaggacagcggt

SEQ ID NO: 886359 - DNA, 75 bp, synthetic construct
  source 1..75: mol_type = other DNA
aacgttgacgcctgggctatctgggatccctactactccgctgcattattacagggcggcgtgcgggtgctgaaa

SEQ ID NO: 886360 - DNA, 75 bp, synthetic construct
  source 1..75: mol_type = other DNA
gtgtttattgaagcatttgcgagcctgatgcagaaggcgaagatcggcacactcggcactgacattttctgtcac

SEQ ID NO: 886361 - DNA, 75 bp, synthetic construct
  source 1..75: mol_type = other DNA
acgctattgccatcatggaaagcaagaagatgtggcgaagtaattatgcccctcctttgctacacctcgcatgga

SEQ ID NO: 886362 - DNA, 75 bp, synthetic construct
  source 1..75: mol_type = other DNA
aacaactgattctgtctgataaagctaacgaccgtggtccggctggtctggttaagcaactggtagacgctagcc

SEQ ID NO: 886363 - DNA, 75 bp, synthetic construct
  source 1..75: mol_type = other DNA
tcactctgtaatgcactgtttcagggggaggtcaccccggtcagtgcactcatgacagtgcttcccggacatgcc

SEQ ID NO: 886364 - DNA, 75 bp, synthetic construct
  source 1..75: mol_type = other DNA
gccacgaacccgtgcctggcattatgggtaaaagcggggctggtaaatcctcactctgtaatgcactgtttcagg

SEQ ID NO: 886365 - DNA, 75 bp, synthetic construct
  source 1..75: mol_type = other DNA
taacgtgaaaatggctcctaaaactttcgcaggtggcaacccgatcagccgtcagtctctgaaaaccgttccggg

SEQ ID NO: 886366 - DNA, 75 bp, synthetic construct
  source 1..75: mol_type = other DNA
ctctgttgcacgcacggttctgcgcgccgtccgtgactcagtggtctctgttgcccgcgcagtatggaactggat

SEQ ID NO: 886367 - DNA, 75 bp, synthetic construct
  source 1..75: mol_type = other DNA
ctctgttgcacgcacggttctgcgagccgtccgtgactccgtggtctctgttgcccgcgcagtatggaactggat

SEQ ID NO: 886368 - DNA, 75 bp, synthetic construct
  source 1..75: mol_type = other DNA
ctctgttgcacgcacggttctgcgagccgtccgtgactcagtggtctctgttgcccgcgccgtatggaactggat

SEQ ID NO: 886369 - DNA, 75 bp, synthetic construct
  source 1..75: mol_type = other DNA
cgccggaaggtaaagctgaatttgcaaacgtgaaaatggctcctaagacgtttgctggtgggaatccgatcagca

SEQ ID NO: 886370 - DNA, 75 bp, synthetic construct
  source 1..75: mol_type = other DNA
tccacagtctgttctgggtcgtctgggtgtgactgttctgtctggtctgaatagcccgattgcagtaccaaaaat

SEQ ID NO: 886371 - DNA, 75 bp, synthetic construct
  source 1..75: mol_type = other DNA
gtcgcgttactaagaaagctgctttctcttacaaagacttcctgaaagaaattgcagcactgaccgacgctggcg

SEQ ID NO: 886372 - DNA, 75 bp, synthetic construct
  source 1..75: mol_type = other DNA
ggtgtgactgttctgtctggtctgaatagcccgattgcagtaccaaaaatgactgcttccagcgtcgaagccttt

SEQ ID NO: 886373 - DNA, 75 bp, synthetic construct
  source 1..75: mol_type = other DNA
cgacgaagaattgaaacgcgcattggcaattaaagacatgacgccggaagcattccgcactaaggcactaaataa

SEQ ID NO: 886374 - DNA, 75 bp, synthetic construct
  source 1..75: mol_type = other DNA
cgtggtggctctgtattcgttccggctgctgctatgcgtgctgctgctgctggtaacaccaaagctgacctgact

SEQ ID NO: 886375 - DNA, 75 bp, synthetic construct
  source 1..75: mol_type = other DNA
tacatgcccatcatcccgatattctgcgttttctcgatacgaaacgggaaaatgccgacgaaaaaatccgcatta

SEQ ID NO: 886376 - DNA, 75 bp, synthetic construct
  source 1..75: mol_type = other DNA
gggcgcaactgcgtaagttaatcgtcggtcagtggctgatggtactgatactttcagccgttaccggcggagcga

SEQ ID NO: 886377 - DNA, 75 bp, synthetic construct
  source 1..75: mol_type = other DNA
gatggtgctgctcaagcccgttctgcctgctgcactaccgccagccagcctctggccgtggctatgggcgctggg

SEQ ID NO: 886378 - DNA, 75 bp, synthetic construct
  source 1..75: mol_type = other DNA
gcccgaaagccgtatcagctggtatggcatacgctggcagaaacccgggcgatgatggcgacatcgatcgcatac

SEQ ID NO: 886379 - DNA, 75 bp, synthetic construct
  source 1..75: mol_type = other DNA
agtatgctgctctgggcggtgctggcgggcgcagtagtgctggctttgctgtgcggtgtgctgggctggatgttg

SEQ ID NO: 886380 - DNA, 75 bp, synthetic construct
  source 1..75: mol_type = other DNA
ctggcagtgttgcaggcgaaagtgtttgatttcccgtgggagccagactggcgattgtggattgttctgccgtgc

SEQ ID NO: 886381 - DNA, 75 bp, synthetic construct
  source 1..75: mol_type = other DNA
gatggttttgctcaagcctgttctgcccgccgcgctgccgcctgccagcttctggccgtggttgtgggcgctcgg

SEQ ID NO: 886382 - DNA, 75 bp, synthetic construct
  source 1..75: mol_type = other DNA
cgctaccgctggcgagtaaatttaaagccgaagcgcgggcaatggctgacagagggttatcaacctacgaggccg

SEQ ID NO: 886383 - DNA, 75 bp, synthetic construct
  source 1..75: mol_type = other DNA
gcggcactgaaaaaatgcgtactggaactgggcggttcggatccgtttattgtgcttaacgatgccgatctggaa

SEQ ID NO: 886384 - DNA, 75 bp, synthetic construct
  source 1..75: mol_type = other DNA
tggccccgttgcggcaatcaccgtagcgagagatgcagaacatgcgctggaactggcgaatgacagtgagttcgg

SEQ ID NO: 886385 - DNA, 75 bp, synthetic construct
  source 1..75: mol_type = other DNA
gcctttgaaaactttatggacatgcacagcccgcaagccgtatcagctggcatggcatacgatggcagaaacccg

SEQ ID NO: 886386 - DNA, 75 bp, synthetic construct
  source 1..75: mol_type = other DNA
attatggcgcttcatgagcataaagactatcagccgctgttgcgtgcaatggcaaacgtgccttgtatcgatgtt

SEQ ID NO: 886387 - DNA, 75 bp, synthetic construct
  source 1..75: mol_type = other DNA
tgaccatagagcaggaacgccagaaggttgcgccggagcttaccgcagcctttgaaaactttatggacatgcaca

SEQ ID NO: 886388 - DNA, 75 bp, synthetic construct
  source 1..75: mol_type = other DNA
caggtagaaccgctaaaagcgttcctcgcggaacatcagatagtcccggaatcgttttatccggtggtgcgggcg

SEQ ID NO: 886389 - DNA, 75 bp, synthetic construct
  source 1..75: mol_type = other DNA
cgacggtaagcgttatctggaagattttgccgatcgagtcacgatggtggcgctgacgctggcacaaggcgatga

SEQ ID NO: 886390 - DNA, 75 bp, synthetic construct
  source 1..75: mol_type = other DNA
tcgaaacgcggcggcggcgtggcatttttgctgtcgaatctgcgggaagcgggcgcgccaattaaacgtattgaa

SEQ ID NO: 886391 - DNA, 75 bp, synthetic construct
  source 1..75: mol_type = other DNA
tccgttccaggcgcgttattatgcaatcggcgaggcaaccccgggtgcagctaatgcggatgcaaccttcaaggt

SEQ ID NO: 886392 - DNA, 75 bp, synthetic construct
  source 1..75: mol_type = other DNA
tttcaccaatctctatttctataccatcacctggcacgcactgcgtacctcgatgttgctggcgcgcgaacgcgg

SEQ ID NO: 886393 - DNA, 75 bp, synthetic construct
  source 1..75: mol_type = other DNA
atccgcagcgtgccgtccatcgaagccggaaatgccgcctcacacgccatcggactggggcagatgaatttacac

SEQ ID NO: 886394 - DNA, 75 bp, synthetic construct
  source 1..75: mol_type = other DNA
caggccatgatatttcctgcaatttaggttcgttgaatattgcgcacaccatggattcccccgactttgcccgca

SEQ ID NO: 886395 - DNA, 75 bp, synthetic construct
  source 1..75: mol_type = other DNA
tagcgaagaaatggcgcaaatgatcacccgtgaaatgggcaaaccaatcaaccaggcgcgcgctgaagtggcgaa

SEQ ID NO: 886396 - DNA, 75 bp, synthetic construct
  source 1..75: mol_type = other DNA
accaacaccattccgttccaggcgcgttattatgtaatcggcgaggcaaccccgggggcagctaatgcggatgca

SEQ ID NO: 886397 - DNA, 75 bp, synthetic construct
  source 1..75: mol_type = other DNA
tcagcaggcagttattgagtatcgaccgttggggacgattctggcgattatgccgtggaattttccgttatggca

SEQ ID NO: 886398 - DNA, 75 bp, synthetic construct
  source 1..75: mol_type = other DNA
ggttttaacattcagctgaatgattgcgataccaatgttgcatctaaagccgctgttgccttcttaggtacggca

SEQ ID NO: 886399 - DNA, 75 bp, synthetic construct
  source 1..75: mol_type = other DNA
tgacgctggacggtgcgacatttagttcagaaacaaccctgaataacggtactaacaccattccgttccaggcgc

SEQ ID NO: 886400 - DNA, 75 bp, synthetic construct
  source 1..75: mol_type = other DNA
atgaaaattaaaactctggcaatcgttgttctgtcggctctgtccctcagttctacagcggctctgtccctcagt

SEQ ID NO: 886401 - DNA, 75 bp, synthetic construct
  source 1..75: mol_type = other DNA
gaagctggcacaactggtgtcgatgctggcgcagtttgaacagcatattgaggatgattcgccgctggctgaggt

SEQ ID NO: 886402 - DNA, 75 bp, synthetic construct
  source 1..75: mol_type = other DNA
ataaaaaagataaccatattcgcgggcaggcgcgtttttgcccgcataagcggttgaataatgcctttatgctcc

SEQ ID NO: 886403 - DNA, 75 bp, synthetic construct
  source 1..75: mol_type = other DNA
cgacgattctggcgcactatctgcgtgagaacggcattgtgccggagaagtgcgatctcaactccattctgttct

SEQ ID NO: 886404 - DNA, 75 bp, synthetic construct
  source 1..75: mol_type = other DNA
gagcgctttgcctttgagaaagttgatatctgcgatcgggcagaactggcacgcgtattcactgagcatcagcca

SEQ ID NO: 886405 - DNA, 75 bp, synthetic construct
  source 1..75: mol_type = other DNA
ccggacgccattttcacgatttctttggcgagaacgtctttcgcgccgatatgtgtaatgccgatgtgaaactgg

SEQ ID NO: 886406 - DNA, 75 bp, synthetic construct
  source 1..75: mol_type = other DNA
gtggcgaactggtttcccggctttctactcatcgccgtgtggtggcgttggaagatactgattttactgatattg

SEQ ID NO: 886407 - DNA, 75 bp, synthetic construct
  source 1..75: mol_type = other DNA
gctggctgacgtagccgcaagtgaccgctacgcctttgagcaggtggatatctgtaatcgcgcggagctggatcg

SEQ ID NO: 886408 - DNA, 75 bp, synthetic construct
  source 1..75: mol_type = other DNA
atgaggtgtatggtgacttaccccatccggatgaagtaaatagcaatgaaacgttgcagctatttacggaaacga

SEQ ID NO: 886409 - DNA, 75 bp, synthetic construct
  source 1..75: mol_type = other DNA
gcatgagcgaaatagaggccgtcagcgtcagtatcgcttgagtgactttaacgtctgtcacggtttcgaagaagc

SEQ ID NO: 886410 - DNA, 75 bp, synthetic construct
  source 1..75: mol_type = other DNA
cgcctggcaattattcagttaggaacttatgacggtactatctataacgctcgccaggtgatcgagaccattggg

SEQ ID NO: 886411 - DNA, 75 bp, synthetic construct
  source 1..75: mol_type = other DNA
gatgaacccccaggatgcgcatagcgctgatatgactttccgtgtcaaaccggaatctctaattttgacgatttt

SEQ ID NO: 886412 - DNA, 75 bp, synthetic construct
  source 1..75: mol_type = other DNA
tgccgcatcctgatgaacatcccgcatcaactgagctgtcactcttcactgaaaccaccgcatatgcacctagca

SEQ ID NO: 886413 - DNA, 75 bp, synthetic construct
  source 1..75: mol_type = other DNA
gtggacacaacgaaaagaaaaacatcgatgtagtgctcactatttgtgatttgttggatgagattgtaccgaaag

SEQ ID NO: 886414 - DNA, 75 bp, synthetic construct
  source 1..75: mol_type = other DNA
tcatggcgggattaaaagcaacgcatgccgacagtgcggttattgtgaccaaattctgtgccgattctaaacgcg

SEQ ID NO: 886415 - DNA, 75 bp, synthetic construct
  source 1..75: mol_type = other DNA
aatattttgttgctagggcttcatttcttaatggtgattatatatttgctaagaaattatatcaagagataatta

SEQ ID NO: 886416 - DNA, 75 bp, synthetic construct
  source 1..75: mol_type = other DNA
tactgaatggataaaaaagcagcctggattttgctcatataaaaagctgatgcgtgaccttggacaacctaaagc

SEQ ID NO: 886417 - DNA, 75 bp, synthetic construct
  source 1..75: mol_type = other DNA
gcaccggagcataaaaatttccgtgaatgcggcgatcaattcttacgttattttctgcgtgggctggcagcgcgc

SEQ ID NO: 886418 - DNA, 75 bp, synthetic construct
  source 1..75: mol_type = other DNA
aggtcagtatcagcatgacgtcagccagacgcaactggcccgcaaactggatgcagtagtagaagactgcgtaaa

SEQ ID NO: 886419 - DNA, 75 bp, synthetic construct
  source 1..75: mol_type = other DNA
cgccgttggcgtcgatctcaacaccgcttctgttccgctgttaactcgcgtggcgggcctgacgcgcatgatggc

SEQ ID NO: 886420 - DNA, 75 bp, synthetic construct
  source 1..75: mol_type = other DNA
gcggtaatgaacgcccgcaaaacaaccgcccggcagccaaaccgcgcgggcgtgaagcgcagcctgccggtaata

SEQ ID NO: 886421 - DNA, 75 bp, synthetic construct
  source 1..75: mol_type = other DNA
ctccgattgcgacccatatgacagcgaatttattactggcgagcgtaccagtgaaggcttcttccgtactcatgc

SEQ ID NO: 886422 - DNA, 75 bp, synthetic construct
  source 1..75: mol_type = other DNA
catcatcaaagagctggaaaaaccggggcgcgacccgcgtccggaatttaaaaccgctcagtttgctgatggcgt

SEQ ID NO: 886423 - DNA, 75 bp, synthetic construct
  source 1..75: mol_type = other DNA
agcggtggtcgatgccactggcaaactggtggcgaccgataccatttacccgcacaccggacaagccgcaaaagc

SEQ ID NO: 886424 - DNA, 75 bp, synthetic construct
  source 1..75: mol_type = other DNA
ccggatgattttgtagtcatgctggcagatcgtgactcttttctgctgtcctggaaagccggggcgcgcgaagcg

SEQ ID NO: 886425 - DNA, 75 bp, synthetic construct
  source 1..75: mol_type = other DNA
gcgataccaatgttgcatctaaagccgctgttgcctttttaggtacggcgattgatgcggctcataccaacgttc

SEQ ID NO: 886426 - DNA, 75 bp, synthetic construct
  source 1..75: mol_type = other DNA
aggatcaacgccagccttgcgctgctgcgtccctcgttgggcgagccgatcccgctgcacctgatcgaccgtttc

SEQ ID NO: 886427 - DNA, 75 bp, synthetic construct
  source 1..75: mol_type = other DNA
attactttgtgattactcactgacgctggcgcaacttcttatcgggcaggggatgcagccaaaagtggagcagac

SEQ ID NO: 886428 - DNA, 75 bp, synthetic construct
  source 1..75: mol_type = other DNA
actcgcttcaacccggcactttcaatcatgagagcttcaatcatgagaaagagcatgttaagtctgtaattaatt

SEQ ID NO: 886429 - DNA, 75 bp, synthetic construct
  source 1..75: mol_type = other DNA
tggctctgcagagttctgctgcaggtagcgcaacaaacgttggtgtgcagatccttgacagaacaggcaatgcgc

SEQ ID NO: 886430 - DNA, 75 bp, synthetic construct
  source 1..75: mol_type = other DNA
atgagctgacgctggacggtgcgacatttagtgcagaaacaaccctgaataacggtactaacaccattccgttcc

SEQ ID NO: 886431 - DNA, 75 bp, synthetic construct
  source 1..75: mol_type = other DNA
gcgatttactctctattcctttcagcgccgctaccgatttcaccattctgaccgctcacggcgatcgattcgccc

SEQ ID NO: 886432 - DNA, 75 bp, synthetic construct
  source 1..75: mol_type = other DNA
aagccgaagtgattctggtggcagaaaacagcccgatcaaaaccgtagccgatcttaaaggtcacaaagttgcct

SEQ ID NO: 886433 - DNA, 75 bp, synthetic construct
  source 1..75: mol_type = other DNA
ctctgttgcacgcacggttctgcgggccgtccgtgactcggtggtctctgttgcccgcgcggtatggaactggat

SEQ ID NO: 886434 - DNA, 75 bp, synthetic construct
  source 1..75: mol_type = other DNA
cgtctgcatgagcgccgtgttcagcgggcgggcaccatgtccggcggtgaacagcagatgctggcgattggtcgc

SEQ ID NO: 886435 - DNA, 75 bp, synthetic construct
  source 1..75: mol_type = other DNA
ctggcaatgggcggtttctttgccgaaagagatcagtttcaggagcgcataaagtgggtctatgagctgttcccg

SEQ ID NO: 886436 - DNA, 75 bp, synthetic construct
  source 1..75: mol_type = other DNA
ttgtcccggaagggcgtcgcgtcttctcgcggatgacggtggaggagaacctggcgatgggcggcttttttgccg

SEQ ID NO: 886437 - DNA, 75 bp, synthetic construct
  source 1..75: mol_type = other DNA
tttcgcgttatgccctgacttttcagggagatatcctttcagtaaactgtcagtgccggatgctcacccgtgtcc

SEQ ID NO: 886438 - DNA, 75 bp, synthetic construct
  source 1..75: mol_type = other DNA
gccgaagagagcgaactgatgcagtcgctgcgccaggtgtgcaaactgtcggcgcgtaaacaaaagcaggtgcag

SEQ ID NO: 886439 - DNA, 75 bp, synthetic construct
  source 1..75: mol_type = other DNA
cgctgcgccaggtgtgcaagctgtcggcgcgtaaacaaaggcaggtgcaggaatttattggagtaattgccggta

SEQ ID NO: 886440 - DNA, 75 bp, synthetic construct
  source 1..75: mol_type = other DNA
tgtcctcaccgcccaaccccccgccgccgaagagagcgaactgatgcagtcgcttcgccaggtgtgcaagctgta

SEQ ID NO: 886441 - DNA, 75 bp, synthetic construct
  source 1..75: mol_type = other DNA
gcttgatgaggaactgagcatcagccagctcgaagagttccaggcggtacaggctgttctgtacggtaaatacac

SEQ ID NO: 886442 - DNA, 75 bp, synthetic construct
  source 1..75: mol_type = other DNA
cgttttgccctgcgtaattgagaaagtcctgatggttaacccggcggcaaatgcggaaagtgtggtgcgtttggc

SEQ ID NO: 886443 - DNA, 75 bp, synthetic construct
  source 1..75: mol_type = other DNA
aaactgtcggcgcgtaaacaaaagcaggtgcaggattttattggggtgattgccggtaaacagaaagtcgcctga

SEQ ID NO: 886444 - DNA, 75 bp, synthetic construct
  source 1..75: mol_type = other DNA
aaacggtggaaatacgctgcgaaggcgatgatgaaaatgaggcaatacaaactctcaccgccttatttcgtgatc

SEQ ID NO: 886445 - DNA, 75 bp, synthetic construct
  source 1..75: mol_type = other DNA
agttatgcgagccgctacccggattacagccgtattcccgccatcaccctgaaaggtcagtggctggaagccgcc

SEQ ID NO: 886446 - DNA, 75 bp, synthetic construct
  source 1..75: mol_type = other DNA
ataccttgcatctgccatgaataaagatgaaacggtacgaaagaatctcgttgattatatcgactcgcttcagcc

SEQ ID NO: 886447 - DNA, 75 bp, synthetic construct
  source 1..75: mol_type = other DNA
cactacgccaggtgtgcaaactgtcggcgcgtaaacaaaagcaggtgcaggaatttattggggtgattacaggta

SEQ ID NO: 886448 - DNA, 75 bp, synthetic construct
  source 1..75: mol_type = other DNA
ggttttgccactggcacggcggtagatgtcaaagtgatggaaggctgtattgtcctcaccgcccaacccgcgccg

SEQ ID NO: 886449 - DNA, 75 bp, synthetic construct
  source 1..75: mol_type = other DNA
cgctacgccaggtgtgcaaactgtcggcacgtaaacaaaagcaggtgcaggagtttattggagtgattgcgggta

SEQ ID NO: 886450 - DNA, 75 bp, synthetic construct
  source 1..75: mol_type = other DNA
atgtcatcaatccgcttaacaacgagaatgaaagagataatcgctcgtaacgctttaattaagtctggggttttc

SEQ ID NO: 886451 - DNA, 75 bp, synthetic construct
  source 1..75: mol_type = other DNA
aaatctgcgcattgcaacaaaaacttgaagccaggaaaaaggatatagaatcaaacgtatgggctgctttgaact

SEQ ID NO: 886452 - DNA, 75 bp, synthetic construct
  source 1..75: mol_type = other DNA
atgtcatcaatccgcttaactacgagaatgagagagaaaatcgcgcgtaacgctttaattaagtccggggttttc

SEQ ID NO: 886453 - DNA, 75 bp, synthetic construct
  source 1..75: mol_type = other DNA
acttcaatttatctgactgtatctggcagaagggttggctggtattcatatgggaaagacggcaacggcgaagat

SEQ ID NO: 886454 - DNA, 75 bp, synthetic construct
  source 1..75: mol_type = other DNA
caatttatctgactgtatctggcagaagggttggatggctttcatatgggaaagacggcaacggcgaagatatat

SEQ ID NO: 886455 - DNA, 75 bp, synthetic construct
  source 1..75: mol_type = other DNA
cagagttattgcgtttggcggtaaaaagaaaactgaggaagtgggtcagttatcatccaagttggtagctataag

SEQ ID NO: 886456 - DNA, 75 bp, synthetic construct
  source 1..75: mol_type = other DNA
tgttgaaatacgacgacgagctgcgtcagttgggcattcggtggatggcggaagaacccgtcaagtttgtcgata

SEQ ID NO: 886457 - DNA, 75 bp, synthetic construct
  source 1..75: mol_type = other DNA
cccgcactggtgcgtactgcgtggtcatatcgctcagggttacctggtggtgaaagcggctatacgacgagaaaa

SEQ ID NO: 886458 - DNA, 75 bp, synthetic construct
  source 1..75: mol_type = other DNA
cccggtaataattattcgctgcataaacaacactgtgttgtacagaagaattgatgggcgaacacagtcagtaaa

SEQ ID NO: 886459 - DNA, 75 bp, synthetic construct
  source 1..75: mol_type = other DNA
gtctgacatcaaaatcatcaacccgttgcgtgatacggctatacaacacctggttaaatgtagttcatgtatcgt

SEQ ID NO: 886460 - DNA, 75 bp, synthetic construct
  source 1..75: mol_type = other DNA
aagaccgtggtagtgactttgtgaaattccgcgaggagaataagggacgattgagttacttacgaggtggacgta

SEQ ID NO: 886461 - DNA, 75 bp, synthetic construct
  source 1..75: mol_type = other DNA
aagaccgtggtagcgactttgtgaaattccgcgaagagaataaggggcgattgagctatttgcgaggcggacgta

SEQ ID NO: 886462 - DNA, 75 bp, synthetic construct
  source 1..75: mol_type = other DNA
attgcagatgttccgcgtgcgggcattgtccatcgtctggataaagacacgacgggtttgatggttgtggcaaaa

SEQ ID NO: 886463 - DNA, 75 bp, synthetic construct
  source 1..75: mol_type = other DNA
ttactgaacgttttgtagcagctgcggcagccttgaaaatgggcgatccacgtgatgaagagaacgatctcggac

SEQ ID NO: 886464 - DNA, 75 bp, synthetic construct
  source 1..75: mol_type = other DNA
agtcgaaaccggagcatggaaagacgcgattgactgggtgctcaaagaggcctgccaggctgtaaacactggcat

SEQ ID NO: 886465 - DNA, 75 bp, synthetic construct
  source 1..75: mol_type = other DNA
catatactacggaatccggtgctgacctcagctttgaacttgatgataagatcattgtttatattaaagataagc

SEQ ID NO: 886466 - DNA, 75 bp, synthetic construct
  source 1..75: mol_type = other DNA
cactggtatcaccggtactgtcgccgctcactgcgtgcagacttcaggacgctggtccgcttactgaatccgtaa

SEQ ID NO: 886467 - DNA, 75 bp, synthetic construct
  source 1..75: mol_type = other DNA
ttacgcgtcagcagataccattgatgtggtgccggaagtcagcggtcgcattgtagaactggcggtcaccgacaa

SEQ ID NO: 886468 - DNA, 75 bp, synthetic construct
  source 1..75: mol_type = other DNA
ggcggcacgaaaaattttcggcatatcgcgcttgttgaagccaaccattttaagcagttcaaaaagctggttaat

SEQ ID NO: 886469 - DNA, 75 bp, synthetic construct
  source 1..75: mol_type = other DNA
atcccacaagatatggtggaactggttgaggcgatgcgtgcggattttgaagaacataaggacgaagtggactgg

SEQ ID NO: 886470 - DNA, 75 bp, synthetic construct
  source 1..75: mol_type = other DNA
attggtcatatgaccgcaggtggcacggtggacgagccaatcagtcgccacccgaccaaacgtacccatatggcg

SEQ ID NO: 886471 - DNA, 75 bp, synthetic construct
  source 1..75: mol_type = other DNA
caagatatggtggagctgattgaggtgatgcgcgccgatttcgaagagcataaggatgaagtggactggttatga

SEQ ID NO: 886472 - DNA, 75 bp, synthetic construct
  source 1..75: mol_type = other DNA
acaaggcggcttgtatgtagtgagcgagtatgtggatggcctaccgtggtcacagtttattgctgagaacgtgtt

SEQ ID NO: 886473 - DNA, 75 bp, synthetic construct
  source 1..75: mol_type = other DNA
tggatggatgtattacgcggcggcgaggctggatttgatcgatttatgttcaaaagtaagcgattggtttgtgga

SEQ ID NO: 886474 - DNA, 75 bp, synthetic construct
  source 1..75: mol_type = other DNA
ggctcatgtagtgctgtgtggcactgcaggtcctgagaacttgccatcaagtgagagtcgctatgttcatacccg

SEQ ID NO: 886475 - DNA, 75 bp, synthetic construct
  source 1..75: mol_type = other DNA
gaacgaatcgatcaccaggaataccgacaaattctggcagaaacagaacaagaagctcatctgaaaaaattacgt

SEQ ID NO: 886476 - DNA, 75 bp, synthetic construct
  source 1..75: mol_type = other DNA
atgtttcattccacaaatcatcaggctgtaattatggctgcatcagcttgtgccacagaccttttccgcttcact

SEQ ID NO: 886477 - DNA, 75 bp, synthetic construct
  source 1..75: mol_type = other DNA
ttatcactgccgggagaatgtaccagattgacccactgttactggaggccatcgcccggcatgaaagtggcctga

SEQ ID NO: 886478 - DNA, 75 bp, synthetic construct
  source 1..75: mol_type = other DNA
atgaaatcaatgagtattgccgccagtggtgaactggtttcccgaatttccacccatcgctgcgtggtggcgctg

SEQ ID NO: 886479 - DNA, 75 bp, synthetic construct
  source 1..75: mol_type = other DNA
agtacgccgtgacctggctttcacgcgaagtgacaatgtcacaggatgcattacttgccgcattgcgcttaagcg

SEQ ID NO: 886480 - DNA, 75 bp, synthetic construct
  source 1..75: mol_type = other DNA
gatgcaggctggcacgcatcccgattattacaccctggctcccgagaaagggaaaaatgcgctgggcattgatgc

SEQ ID NO: 886481 - DNA, 75 bp, synthetic construct
  source 1..75: mol_type = other DNA
tttaaagatgcgggaatcccacaaggcgtatatggctggctgaatgccgacaacgacggtgtcagtcagatgatt

SEQ ID NO: 886482 - DNA, 75 bp, synthetic construct
  source 1..75: mol_type = other DNA
ctcattggtaaagtatggcctgttgttgtggctgtggttggcgctgggcttgccattcgtattttcaaaaaattc

SEQ ID NO: 886483 - DNA, 75 bp, synthetic construct
  source 1..75: mol_type = other DNA
tgcctataccgactggaatgaaacgcagcagaaacagccggatggaagctgggttaattacaactacgactggat

SEQ ID NO: 886484 - DNA, 75 bp, synthetic construct
  source 1..75: mol_type = other DNA
cttccgggtgcacacctttgaagaagagattgaatttgttcaggggttaaatcactctaccgggaaaaatatcgg

SEQ ID NO: 886485 - DNA, 75 bp, synthetic construct
  source 1..75: mol_type = other DNA
cgcctggcgattattcagctgggaacctatgacggcactgtctataacgcccgtcaggtgatcgataccgttggg

SEQ ID NO: 886486 - DNA, 75 bp, synthetic construct
  source 1..75: mol_type = other DNA
aaccgtgctgatctacgcgggacagcgagaggaaatccttgaggatgctctacgcaagctcgcagtgaacgggaa

SEQ ID NO: 886487 - DNA, 75 bp, synthetic construct
  source 1..75: mol_type = other DNA
taggttttggtgctggtgatatggctatcgcgatagtaatgatgtctttggccatgatcatcacttatttttaca

SEQ ID NO: 886488 - DNA, 75 bp, synthetic construct
  source 1..75: mol_type = other DNA
agtacgggaagtcaccgaaaagctaaatgagcacgcacgtttaggcggtgcaaaagttgtctgggtaaccgatgc

SEQ ID NO: 886489 - DNA, 75 bp, synthetic construct
  source 1..75: mol_type = other DNA
gctggcgggcgataacgaacaacagcagcgtctggagcaggcgctgatgaccccggacactgacgaatattacaa

SEQ ID NO: 886490 - DNA, 75 bp, synthetic construct
  source 1..75: mol_type = other DNA
gatcgcgccggattattgctacaactggcaaacttgccgacgccgccggaaagcgtgccaatcaacatgctggtg

SEQ ID NO: 886491 - DNA, 75 bp, synthetic construct
  source 1..75: mol_type = other DNA
aactgtataccgacaatgccgattacccggtaaaaattgttcgctgcataaacaacactgtgttgtacagaagaa

SEQ ID NO: 886492 - DNA, 75 bp, synthetic construct
  source 1..75: mol_type = other DNA
aaatattgacctacaaaacattacactggctatttttcagaaactggactatctcactaggaaaaacgctaaata

SEQ ID NO: 886493 - DNA, 75 bp, synthetic construct
  source 1..75: mol_type = other DNA
aatcatttaaatttacacacgcaacaaatattgacctacaaaacattacactggctatttttcagaaactggact

SEQ ID NO: 886494 - DNA, 75 bp, synthetic construct
  source 1..75: mol_type = other DNA
tgagtgaatctcaagcgcagcgcctggcgaatgccgggctggattactacaaccacaacctcgacacctcgccgg

SEQ ID NO: 886495 - DNA, 75 bp, synthetic construct
  source 1..75: mol_type = other DNA
attgtgctggcgacgtttgtctctggcaaacgcgcgcagcttccggcgctggtagctcatgcgggcgtgctgtta

SEQ ID NO: 886496 - DNA, 75 bp, synthetic construct
  source 1..75: mol_type = other DNA
ttgcgctggcctgccatgatgcgactcacttgcatcggcattctggcgcagttcgcgctcctgctgctcgccttt

SEQ ID NO: 886497 - DNA, 75 bp, synthetic construct
  source 1..75: mol_type = other DNA
gcggcgtttttacgaagcacgtcgtcagcaaatgatggagccgtcaattcgctggaacggtatccatgactggta

SEQ ID NO: 886498 - DNA, 75 bp, synthetic construct
  source 1..75: mol_type = other DNA
agtacgttgagatgggtaatagcacctttgcttgccctggacatcaacatggtgcgttctttaaaaagcatcctg

SEQ ID NO: 886499 - DNA, 75 bp, synthetic construct
  source 1..75: mol_type = other DNA
ccttatccacctggcgtgctttgcgtggtacccggagaagtctggggtggggcggttcaacgttatttccttgcg

SEQ ID NO: 886500 - DNA, 75 bp, synthetic construct
  source 1..75: mol_type = other DNA
gccactgcgctgctgcacagtttgtccctgacacgccagcgggggattttccgccactggtcgctgttgctggcg

SEQ ID NO: 886501 - DNA, 75 bp, synthetic construct
  source 1..75: mol_type = other DNA
ttccagaatcaggtttgaaccgccccgggtttcctggagagtgttttatctgtgaactcaggctgccagatcatc

SEQ ID NO: 886502 - DNA, 75 bp, synthetic construct
  source 1..75: mol_type = other DNA
tggcagatatcagtcagcatatggccgcgctggcgctggaacaggaaaaaagccgccagcatattgaacaactca

SEQ ID NO: 886503 - DNA, 75 bp, synthetic construct
  source 1..75: mol_type = other DNA
aagttcaaaatgcgcaaagctggtcagcgaccattcgtcagcgcgatggcgcgcctgcggggatcctgcaaatta

SEQ ID NO: 886504 - DNA, 75 bp, synthetic construct
  source 1..75: mol_type = other DNA
atggcgtttttctggacagaagagggagcggagcacagccggcaggtgatgttaactgaaagcggatatctgtcg

SEQ ID NO: 886505 - DNA, 75 bp, synthetic construct
  source 1..75: mol_type = other DNA
atggctgattcccgtcgtgatgtgaaccgtcctgacgccgcacaatctccacgccggcacgggctgctgtataac

SEQ ID NO: 886506 - DNA, 75 bp, synthetic construct
  source 1..75: mol_type = other DNA
aacgcagtccgcagtcccgccctccccgtcagcatgggttgctgtacaatctggtgtggggctggccatgggctc

SEQ ID NO: 886507 - DNA, 75 bp, synthetic construct
  source 1..75: mol_type = other DNA
gtgcataaaccgggaggcttgctatcaacacaccagaaagacggtgtgtgggcgctaactgcggatgcggatttt

SEQ ID NO: 886508 - DNA, 75 bp, synthetic construct
  source 1..75: mol_type = other DNA
cgggcatccggcggaaaaatacaaagaggaattttatctcggtctgcaacgcggcagaaataataccacgttatt

SEQ ID NO: 886509 - DNA, 75 bp, synthetic construct
  source 1..75: mol_type = other DNA
gcgtattgtgtcagcatccggcagaggttattgccgggttaacaggatatgaggcatttatggagttacttcaca

SEQ ID NO: 886510 - DNA, 75 bp, synthetic construct
  source 1..75: mol_type = other DNA
aattcagaaacaaatgacgcctttccttaaacagtttgaacaggaaaacggtgttaggtacaaattcaatgttaa

SEQ ID NO: 886511 - DNA, 75 bp, synthetic construct
  source 1..75: mol_type = other DNA
taaagccgctattggtcgtctgaaaggtgaggaactggcgcaatataatttgtggctggattacctggacgcact

SEQ ID NO: 886512 - DNA, 75 bp, synthetic construct
  source 1..75: mol_type = other DNA
attgtcgcgctcatcctttggtttctgacaacgcgtatgcggctcgggcgcaacatctacgcactgggcggcaac

SEQ ID NO: 886513 - DNA, 75 bp, synthetic construct
  source 1..75: mol_type = other DNA
gccgtctgccatttaccctaatctggtgttgttaccggcggctctgttgttcgggcttgcggtggcagtggctac

SEQ ID NO: 886514 - DNA, 75 bp, synthetic construct
  source 1..75: mol_type = other DNA
tcgcgtagatatcggtaacttgcattatattgataccggcgcggtctttggtggaacactcacgttggaacgact

SEQ ID NO: 886515 - DNA, 75 bp, synthetic construct
  source 1..75: mol_type = other DNA
attgcgtgaaggccgaaaagggcagggaattaccggcgctgatcatttctggtttggtcatacgccattacgcca

SEQ ID NO: 886516 - DNA, 75 bp, synthetic construct
  source 1..75: mol_type = other DNA
agaagattgatggcagtccgtggcgacatatctggctggtgggggatattcatggctgcctggcgcaactgcgta

SEQ ID NO: 886517 - DNA, 75 bp, synthetic construct
  source 1..75: mol_type = other DNA
actatcagccgctgttacgtgcaatggcaaacgtgccttgtattgatgttgatacggctaaaaacatcctgaaca

SEQ ID NO: 886518 - DNA, 75 bp, synthetic construct
  source 1..75: mol_type = other DNA
gtaggtgatgtcattgaccgtggcctggagagtttgcgttgcctgcaactactggagcaacgttgggttagagcg

SEQ ID NO: 886519 - DNA, 75 bp, synthetic construct
  source 1..75: mol_type = other DNA
tcgtgtagatatcggtaacttgcattatatcgatactggcgctgtcttcggtgggacgctcacgctggaacagct

SEQ ID NO: 886520 - DNA, 75 bp, synthetic construct
  source 1..75: mol_type = other DNA
cgtatccggagtatagggattctgggatggagtggttgggggagatacctcgcacttggcagacatacacaggaa

SEQ ID NO: 886521 - DNA, 75 bp, synthetic construct
  source 1..75: mol_type = other DNA
ctttgcggaaatataaattacgcaattggaaagttttgggcttcagaacatgctgttgttgtcaccccaaacgaa

SEQ ID NO: 886522 - DNA, 75 bp, synthetic construct
  source 1..75: mol_type = other DNA
aaaccccgcgtcacccggcaaaagaacccggtttgctgaccaaactggtgtggcactggccgtgggccatcatcg

SEQ ID NO: 886523 - DNA, 75 bp, synthetic construct
  source 1..75: mol_type = other DNA
tttatccttctggtggtgttaaaaaatgtttcaaatatgaaaccttctttcccgtacatgatgagtctgtaaaaa

SEQ ID NO: 886524 - DNA, 75 bp, synthetic construct
  source 1..75: mol_type = other DNA
cgtatccggagtatagggattctggggtggagtggttgggggagatacccagtgattggcataccataaaactaa

SEQ ID NO: 886525 - DNA, 75 bp, synthetic construct
  source 1..75: mol_type = other DNA
aacagttaaaacaaatcgaactccttaaagaacgccgcaccgcccttatctccgccgccgtcaccggcaaaatcg

SEQ ID NO: 886526 - DNA, 75 bp, synthetic construct
  source 1..75: mol_type = other DNA
accgtatattttcttacagcaataaaccattaacgccaacgcaattaaaagaaacagtagagttagcagcaagga

SEQ ID NO: 886527 - DNA, 75 bp, synthetic construct
  source 1..75: mol_type = other DNA
ccgcccgccaccaaaggttatccgccatcggcattcggcatgatccccaaactggtcgagagcgcaggcaacagc

SEQ ID NO: 886528 - DNA, 75 bp, synthetic construct
  source 1..75: mol_type = other DNA
ggcgcttgtccggaagattgcaaatactgcccgcaaagctctcgctataaaaccggtctggaagctgagcggttg

SEQ ID NO: 886529 - DNA, 75 bp, synthetic construct
  source 1..75: mol_type = other DNA
ggaacaaatggtgcagggggtaaaagcgatggggctggaggcgtgtatgacgctgggcacgttgagtgaatctca

SEQ ID NO: 886530 - DNA, 75 bp, synthetic construct
  source 1..75: mol_type = other DNA
agtttaacccaaacgacaaatcttttatttcaccgggttctcttgttgcgggcggagtgtgttataacaccgatg

SEQ ID NO: 886531 - DNA, 75 bp, synthetic construct
  source 1..75: mol_type = other DNA
aaccgaaagatgccaccctgacggcgctggccgggcttgttactgcggcagacaggtttccgtattttacgggga

SEQ ID NO: 886532 - DNA, 75 bp, synthetic construct
  source 1..75: mol_type = other DNA
catcggcattcggcatgatccccaaactggtcgaaagtgcaggcaacagcgaaagcgcgggatcgatgaccgcca

SEQ ID NO: 886533 - DNA, 75 bp, synthetic construct
  source 1..75: mol_type = other DNA
cgcctggtttcgcgaccgcgggcatcacgttttactgctggtggattccctgacccgctacgccatggctcagcg

SEQ ID NO: 886534 - DNA, 75 bp, synthetic construct
  source 1..75: mol_type = other DNA
gtggttggctggaatattcaggataccactcgtctgtggctggagggctggattgccagtcaacaaggatggcgc

SEQ ID NO: 886535 - DNA, 75 bp, synthetic construct
  source 1..75: mol_type = other DNA
gcttcagcctgaagcccctcattgctggtatcaccggtactgtcgccgctcactgcgtgcagacttcaggacgct

SEQ ID NO: 886536 - DNA, 75 bp, synthetic construct
  source 1..75: mol_type = other DNA
cgtaaaagatgttcgtcttggttcacagcaatatcatggtgtgaacaactggcaaacatggaatttcaagtgccc

SEQ ID NO: 886537 - DNA, 75 bp, synthetic construct
  source 1..75: mol_type = other DNA
gattcccgatacgtaaaagatgttcgtcttggttcacagcaatatcatggtgtgaacaactggcaaacatggaat

SEQ ID NO: 886538 - DNA, 75 bp, synthetic construct
  source 1..75: mol_type = other DNA
atattgagtgcggttttgagcgccattcattcaaaaagaaacattccgctgatgttttttgtgaggttgtatgtg

SEQ ID NO: 886539 - DNA, 75 bp, synthetic construct
  source 1..75: mol_type = other DNA
aaaagacctgatgacgctgaaatgggatgcactaaatattctggtaaatgccgtcattaatggcagtcttggagt

SEQ ID NO: 886540 - DNA, 75 bp, synthetic construct
  source 1..75: mol_type = other DNA
taattcttaagtctgtaaaagaactggcagctattagcgatgactcaataatcaatgtcagtgccttatgcagaa

SEQ ID NO: 886541 - DNA, 75 bp, synthetic construct
  source 1..75: mol_type = other DNA
agacatctgcattcggcgttaataccgataatgcactgggtggtaattccattactctcggagataacgacactg

SEQ ID NO: 886542 - DNA, 75 bp, synthetic construct
  source 1..75: mol_type = other DNA
ccggctgggaaaaattgctcccggtgtgcgacggcgcaatgctcgatctcaaagcgtgggggagcgaatgtcatc

SEQ ID NO: 886543 - DNA, 75 bp, synthetic construct
  source 1..75: mol_type = other DNA
cagcaggaaagcagtctggtcgccactgcaataaatcataacaaaaataaatcagggaaaattatcagtacggat

SEQ ID NO: 886544 - DNA, 75 bp, synthetic construct
  source 1..75: mol_type = other DNA
tcgggatcaaaatggaaacaggtcttgttcgctggggtgctccactggcgattgcccttctgattccggtattca

SEQ ID NO: 886545 - DNA, 75 bp, synthetic construct
  source 1..75: mol_type = other DNA
tgaagaagagcggttttgggcgtgaactctcccatttcggcttacatgagttctgtaatattcagaccgtgtgga

SEQ ID NO: 886546 - DNA, 75 bp, synthetic construct
  source 1..75: mol_type = other DNA
ctcggtttgcaggaaacggtaaacagggctggtaacgccgtgcaaaaaaatggcgataccttgtccggtgggctt

SEQ ID NO: 886547 - DNA, 75 bp, synthetic construct
  source 1..75: mol_type = other DNA
tgtgagagatgtcagacttggcacgcgtgttgttcaaactatgcaaaaaggcgtgatgtatgaaaaatcaggcca

SEQ ID NO: 886548 - DNA, 75 bp, synthetic construct
  source 1..75: mol_type = other DNA
aaaatgatgccgacagcgatactgattcatacatgtggtttgaaacaggcgacaacggcaatgaatatttcaaat

SEQ ID NO: 886549 - DNA, 75 bp, synthetic construct
  source 1..75: mol_type = other DNA
ttggtgaagttgatggtgacgacccagcaagattgaggcctttacagtattgcattaatggaacttggtatacag

SEQ ID NO: 886550 - DNA, 75 bp, synthetic construct
  source 1..75: mol_type = other DNA
tcaaaaatgctccgcaactgcgtcacctcacctgtctggtggacagcaacggcatgttgagcgaaaccggctggg

SEQ ID NO: 886551 - DNA, 75 bp, synthetic construct
  source 1..75: mol_type = other DNA
gcaactaaattgaaaacagccagaaacattaatggcgtcaggttcgatggttctggtgacattaatatcaatact

SEQ ID NO: 886552 - DNA, 75 bp, synthetic construct
  source 1..75: mol_type = other DNA
cgccgttttgtggttcaggtaacgggctatggcagccgtggcgaacgctggattattgatcgttacaacatcacg

SEQ ID NO: 886553 - DNA, 75 bp, synthetic construct
  source 1..75: mol_type = other DNA
tgctcggcatggtgcctggctggatgggcattgaacgtgtgcttaatcaggttggtccggtggtcggtcgccaga

SEQ ID NO: 886554 - DNA, 75 bp, synthetic construct
  source 1..75: mol_type = other DNA
cgcatattaagcaactgattctggcgctggaaaataaacatgccgattactcacaccagttactggcgggattaa

SEQ ID NO: 886555 - DNA, 75 bp, synthetic construct
  source 1..75: mol_type = other DNA
gttttaccgatgtcgcccaggacatgctcaacatgcaaaaagcaaaactgaccggcgattatctccatacctcag

SEQ ID NO: 886556 - DNA, 75 bp, synthetic construct
  source 1..75: mol_type = other DNA
ggtgggctgcgaccagtacgcgaagaagatgttatcgctatccgcaataaagccgctcgcgctttacaggctgtc

SEQ ID NO: 886557 - DNA, 75 bp, synthetic construct
  source 1..75: mol_type = other DNA
cgtcaatcaaaattgttaacggcgtcgttaccgaactggatggaaaacccgccagccagtttgacctgatcgacc

SEQ ID NO: 886558 - DNA, 75 bp, synthetic construct
  source 1..75: mol_type = other DNA
gggaagacgcgaaaggtgagttcttgatgtcggttccgggaaaaatgctgctttgcagcgtttgcttgttggctg

SEQ ID NO: 886559 - DNA, 75 bp, synthetic construct
  source 1..75: mol_type = other DNA
cccgttgccattcccggcattgcatccgtggtgaaccgggaggactggctgaccgtaccgggtgccgatgaggaa

SEQ ID NO: 886560 - DNA, 75 bp, synthetic construct
  source 1..75: mol_type = other DNA
tatacagcatggccgtcacggaagaaacgcttatcagcagcggtaaaagcggcgcatccgttcccgtggaagcca

SEQ ID NO: 886561 - DNA, 75 bp, synthetic construct
  source 1..75: mol_type = other DNA
ccatcggcggcggtattgaacttgccttgtgctgcgatattcgaatcgctcgccccagcgcgaaattttctaacc

SEQ ID NO: 886562 - DNA, 75 bp, synthetic construct
  source 1..75: mol_type = other DNA
ctttgccgcttttacggggtgaggatgaagaaggaacgtaaaatttcccggtttgagaaaccttctcctttcgag

SEQ ID NO: 886563 - DNA, 75 bp, synthetic construct
  source 1..75: mol_type = other DNA
gggaagacgcgaaaggtgagttcttgatgtcggttccgggaaaggggctgctttgccgcttttacggggtgagga

SEQ ID NO: 886564 - DNA, 75 bp, synthetic construct
  source 1..75: mol_type = other DNA
tatggtacagaacctgttttcaccgatggcgatgacaccccgtggtcaaaaggatttctcgcgtcatcctatgcg

SEQ ID NO: 886565 - DNA, 75 bp, synthetic construct
  source 1..75: mol_type = other DNA
caggctatgtgcatttccctgactggctggggagctggttttacgacgaactgacgtatgaagagcggagcagtg

SEQ ID NO: 886566 - DNA, 75 bp, synthetic construct
  source 1..75: mol_type = other DNA
ctggctggggagctggttttacgacgaactgacgtatgaagagcggagcagtgacggaaagtggagcaagccggg

SEQ ID NO: 886567 - DNA, 75 bp, synthetic construct
  source 1..75: mol_type = other DNA
cagcacgaaccgattcaggttatatccttcgcgcgccaagacgaatgcgggttgctgatgctgtcgctcagtata

SEQ ID NO: 886568 - DNA, 75 bp, synthetic construct
  source 1..75: mol_type = other DNA
gggtacatcactcaggtcaattaccggagaactccgatgaagaaatcacttgttcacacacattgcaggcgctgc

SEQ ID NO: 886569 - DNA, 75 bp, synthetic construct
  source 1..75: mol_type = other DNA
ttagagcataagtttttagttgtacataaaagtgataaacctgaggacatttacgaatcttatcaactaatagaa

SEQ ID NO: 886570 - DNA, 75 bp, synthetic construct
  source 1..75: mol_type = other DNA
tatcaacagtcagttgcgttcctgaacaaactggaaagaataacaatcaggaacgataactactttatagtattg

SEQ ID NO: 886571 - DNA, 75 bp, synthetic construct
  source 1..75: mol_type = other DNA
aacacagtggcgcgaccagtcgcagccagacagcgattatcacgagctgaaggttgccgtaaaaaacatcaccga

SEQ ID NO: 886572 - DNA, 75 bp, synthetic construct
  source 1..75: mol_type = other DNA
ccggacgacaattaccacgagcaggaagctgccgtaaaagacattaccgggcgcacggaagcccttgcaagacag

SEQ ID NO: 886573 - DNA, 75 bp, synthetic construct
  source 1..75: mol_type = other DNA
gcgtgacctgatggttgacggcggcctgcgtccggtgaccgaggcggaaaccattgccattcgccagaaagcggc

SEQ ID NO: 886574 - DNA, 75 bp, synthetic construct
  source 1..75: mol_type = other DNA
cccccggcagggatgtgaaggatgtgaaatggcgacggacttcaccgcatgaggctccaccaaccacggggatac

SEQ ID NO: 886575 - DNA, 75 bp, synthetic construct
  source 1..75: mol_type = other DNA
tattgatcgttacaacatcacgcagtcattgcgcggtgacagcgacggggagagccagcgaattgatccggccag

SEQ ID NO: 886576 - DNA, 75 bp, synthetic construct
  source 1..75: mol_type = other DNA
ccgaacaacttcaacccatcaacgaacagctcagggtactgaagggacaaatccagaccctaaatgccagttatc

SEQ ID NO: 886577 - DNA, 75 bp, synthetic construct
  source 1..75: mol_type = other DNA
tatttgctgttgtttgcagctctaatgttgattatcggctgggaaaaacgcttcttccgccgtgcggcaccgcag

SEQ ID NO: 886578 - DNA, 75 bp, synthetic construct
  source 1..75: mol_type = other DNA
cgcgccggaggaaggttcaccggacggaaccgcgccggcggacctgactggcacctggtaccgccagctggactc

SEQ ID NO: 886579 - DNA, 75 bp, synthetic construct
  source 1..75: mol_type = other DNA
caatgagagcgccacgccggaggagggcgctctgaacgtcaccgcgccggcggaccggaccgacacctggtaccg

SEQ ID NO: 886580 - DNA, 75 bp, synthetic construct
  source 1..75: mol_type = other DNA
gcgcagggctacgatctcaacggtaaccccggcgagccgctgtttatttatgacgccagcaatgccgatggccca

SEQ ID NO: 886581 - DNA, 75 bp, synthetic construct
  source 1..75: mol_type = other DNA
atccggccaccatcaacacgtctgaggttgaagagatattccgggatgaaggttttatgctcgcacacgggcgcg

SEQ ID NO: 886582 - DNA, 75 bp, synthetic construct
  source 1..75: mol_type = other DNA
gttactgagtgagacactttcccgcgcacagaccgggaaacgtcatatcctgcagctgaacagcaccggggacac

SEQ ID NO: 886583 - DNA, 75 bp, synthetic construct
  source 1..75: mol_type = other DNA
acgccggatcaggcttcccgcctcacccgccttatccgctggccgctgatgagtcaggaagaatttgaccggcgc

SEQ ID NO: 886584 - DNA, 75 bp, synthetic construct
  source 1..75: mol_type = other DNA
aagctttatgtggatggcgtatcagctattgagggtttatcctcatcaggtaagaaagtatttaagatactgtat

SEQ ID NO: 886585 - DNA, 75 bp, synthetic construct
  source 1..75: mol_type = other DNA
atgtcatttactgatatctatcagatttccggctcggcgatgacggcgcaaacgctacgtctgaataccgttgcc

SEQ ID NO: 886586 - DNA, 75 bp, synthetic construct
  source 1..75: mol_type = other DNA
ctgaagtcaaagcaaaagcacttgctaatcctgacgttaaaaaggcttacgatgaagccacgcaggaagaagaac

SEQ ID NO: 886587 - DNA, 75 bp, synthetic construct
  source 1..75: mol_type = other DNA
aggccgaagccaacggcgataacgcctccgcgctgtacgacgcccgcgatcagatggtggaagaactgagcggga

SEQ ID NO: 886588 - DNA, 75 bp, synthetic construct
  source 1..75: mol_type = other DNA
aacgccgatggcccgctgaccgtcaacccggatatcaccgccgatgagctggcgttctccagttcgccggacgaa

SEQ ID NO: 886589 - DNA, 75 bp, synthetic construct
  source 1..75: mol_type = other DNA
gcggcgcatcaaccgcgcaggtggagctgaacgtcacggcgcaaaacaccgccaacgccatgaccacgggctaca

SEQ ID NO: 886590 - DNA, 75 bp, synthetic construct
  source 1..75: mol_type = other DNA
ttcagggggatgcctgaagagttcaccgccctgcgcaaactgctggccaccaatacggacataccggtagagaac

SEQ ID NO: 886591 - DNA, 75 bp, synthetic construct
  source 1..75: mol_type = other DNA
cataaaagactggccgctggcctccgatccttctcaacaaatgcgactgatggcaatggcggtggactccggcgg

SEQ ID NO: 886592 - DNA, 75 bp, synthetic construct
  source 1..75: mol_type = other DNA
ggaagcacagagtgaattccttctgttatccagcaccggtggtacttccacgcaaattaaaggcgttctggaacg

SEQ ID NO: 886593 - DNA, 75 bp, synthetic construct
  source 1..75: mol_type = other DNA
tggtatgacccaatgaagccggataccaaatttgacaaacccggtaaatcccccttcatggatatggatctggtg

SEQ ID NO: 886594 - DNA, 75 bp, synthetic construct
  source 1..75: mol_type = other DNA
ctcattgccgggcgtttctttgcggcggagaattccacgccagcaacgctatcttcaaaccgatcgattttcagc

SEQ ID NO: 886595 - DNA, 75 bp, synthetic construct
  source 1..75: mol_type = other DNA
ctggctgggcagctggttctatgacgaactgacgtatgaggaacgctcgaatgaagggaaatggagtaagcccgg

SEQ ID NO: 886596 - DNA, 75 bp, synthetic construct
  source 1..75: mol_type = other DNA
acatccgccgcgatgtttccggtattttacgagccccgcgtcgtatgccggtggccgatgcggtcagtacttata

SEQ ID NO: 886597 - DNA, 75 bp, synthetic construct
  source 1..75: mol_type = other DNA
cctgacccggaagggatgatccgccgcctgaaagcgaaaggactgaaaatctgcgtctggattaacccctatatc

SEQ ID NO: 886598 - DNA, 75 bp, synthetic construct
  source 1..75: mol_type = other DNA
aaatggtacagatggccaagcatttcttgatagcagtggtaacttccagtgcggcgggcaaatacttccagctaa

SEQ ID NO: 886599 - DNA, 75 bp, synthetic construct
  source 1..75: mol_type = other DNA
aataaggtatcaaccagttccgcccaggcattattaagacaagaccatgctgacagaaagttctttattggtggt

SEQ ID NO: 886600 - DNA, 75 bp, synthetic construct
  source 1..75: mol_type = other DNA
ataataaatggaattgatctattgttgctagatagttttggtgctcaaagtgatgatattacggaagtgtcatta

SEQ ID NO: 886601 - DNA, 75 bp, synthetic construct
  source 1..75: mol_type = other DNA
tattatcttcatatcaaaaaacatatatccactctgtctttttaattattttcactattatggggacgctttatt

SEQ ID NO: 886602 - DNA, 75 bp, synthetic construct
  source 1..75: mol_type = other DNA
agtgagaatatatttcagattcaagcaataagtacttttgctgaagcattatttcatatcattttaggatatgtt

SEQ ID NO: 886603 - DNA, 75 bp, synthetic construct
  source 1..75: mol_type = other DNA
ccagcgcatccgcgttacattcagaccgtctggggtctgggctacgtctttgtaccggacggctctaaagcatga

SEQ ID NO: 886604 - DNA, 75 bp, synthetic construct
  source 1..75: mol_type = other DNA
tgcggtgctgcgtcgtcaggcgaacgaactgccgggcgcgccgtcacaggaagaggcggtaattgctttcggtaa

SEQ ID NO: 886605 - DNA, 75 bp, synthetic construct
  source 1..75: mol_type = other DNA
tgcggtgctgcgtcgtcaggccaacgaaactgccgggcgcgccgtcacaggaagaggcggtaattgctttcggta

SEQ ID NO: 886606 - DNA, 75 bp, synthetic construct
  source 1..75: mol_type = other DNA
cgtctgccttcgacctgctttgctgaagaagatggttctattgctaactccggtcgctggctgcagtggcactgg

SEQ ID NO: 886607 - DNA, 75 bp, synthetic construct
  source 1..75: mol_type = other DNA
acaactggggctatgactggctgccgaagtgggaccagacctacgacgtcatcaagtatttcaacatgatggatg

SEQ ID NO: 886608 - DNA, 75 bp, synthetic construct
  source 1..75: mol_type = other DNA
ttaacttaatcacagtccttctgtctcagctcctgatacagatatatatgtggcataacattccggtatccgaac

SEQ ID NO: 886609 - DNA, 75 bp, synthetic construct
  source 1..75: mol_type = other DNA
gttcacggcatggcggcttctttccactccggagaaataaccacgcaccgaactaccggcaccctggcggatggt

SEQ ID NO: 886610 - DNA, 75 bp, synthetic construct
  source 1..75: mol_type = other DNA
tgctgttctacgccagtcccaaagcgtcgtactgcaccggacagtcaatcaatgtcaccggtggtcaggtgatgt

SEQ ID NO: 886611 - DNA, 75 bp, synthetic construct
  source 1..75: mol_type = other DNA
aaccctgccgcagcaccacttttcaggcaatgaataatgtccgtaaggcaggtggatggatctgttttgacccca

SEQ ID NO: 886612 - DNA, 75 bp, synthetic construct
  source 1..75: mol_type = other DNA
cctggcgtgatttaggaaatgcagtaacggaaggtcgatttaaaggttctgcaatcgcatctatcgattatgaat

SEQ ID NO: 886613 - DNA, 75 bp, synthetic construct
  source 1..75: mol_type = other DNA
ttaaaaaaaatgataattatgctattggtattagctttccctattggtctgacaataatattttcatctgatatt

SEQ ID NO: 886614 - DNA, 75 bp, synthetic construct
  source 1..75: mol_type = other DNA
tattcaacctgtcagagccgcaattcaacgccgtaaaaactgccgcacgcgcggcgctttctgcctgcaaagcag

SEQ ID NO: 886615 - DNA, 75 bp, synthetic construct
  source 1..75: mol_type = other DNA
gttgctactcggtaacatgggtatggccggtggcggcgtgaacgcattgcgtggtcactccaacattcaggggct

SEQ ID NO: 886616 - DNA, 75 bp, synthetic construct
  source 1..75: mol_type = other DNA
aagtgagctgttaacaaaagattttttacctgaatctagagatcttcttgagtcaatgggaataaaaggagttct

SEQ ID NO: 886617 - DNA, 75 bp, synthetic construct
  source 1..75: mol_type = other DNA
gcgcattgatgaatataagaaaaaatttatagatgcatccccatcaggtaagcgtaatttgattatatctcttgc

SEQ ID NO: 886618 - DNA, 75 bp, synthetic construct
  source 1..75: mol_type = other DNA
tatgaagatggtgttaagtccaatatgctgtattttccgttcagacctgttttggatgagcagtatttatatttt

SEQ ID NO: 886619 - DNA, 75 bp, synthetic construct
  source 1..75: mol_type = other DNA
gaagtataccgttttccccttcattcattagttttatcaatgacattgtttctccggatgatttgcttgacgttc

SEQ ID NO: 886620 - DNA, 75 bp, synthetic construct
  source 1..75: mol_type = other DNA
tttagcacttgatgcagaaggtgccagagtattgtctttcagggaaagaagtataccgtttaccccttcattcat

SEQ ID NO: 886621 - DNA, 75 bp, synthetic construct
  source 1..75: mol_type = other DNA
agaaccgtcatctacggtaagacggtcccgatgttacgggcgtttaaagtggcaaaacaggaggctggcaatggt

SEQ ID NO: 886622 - DNA, 75 bp, synthetic construct
  source 1..75: mol_type = other DNA
ttccagtctttctggtgataagtggatgcgagcatatcagcggatattcagcactggcacaaaagatccagcaaa

SEQ ID NO: 886623 - DNA, 75 bp, synthetic construct
  source 1..75: mol_type = other DNA
aatgtttattcgatttttagctacctggtggttagcagcgaaggtatgtggattttcatggcgaatgtcaattgg

SEQ ID NO: 886624 - DNA, 75 bp, synthetic construct
  source 1..75: mol_type = other DNA
gatttccggtttcgcttaggtttttgtaaggattgtataaatcattttatggatgttatcagattatgcgataaa

SEQ ID NO: 886625 - DNA, 75 bp, synthetic construct
  source 1..75: mol_type = other DNA
caaataaattaccaaacaatgtatctgattatgactcttcatgtatactagcatcattgaagtcgaaaattacgt

SEQ ID NO: 886626 - DNA, 75 bp, synthetic construct
  source 1..75: mol_type = other DNA
acatttacatcaaaatattcctgtttttattgtgataagtggatgcgagcacatccgtggatatacaacactggc

SEQ ID NO: 886627 - DNA, 75 bp, synthetic construct
  source 1..75: mol_type = other DNA
caggcaaaaatagaaccattcgttggtttttttttagagacttaagcgtactggaactatcgagtaagatatata

SEQ ID NO: 886628 - DNA, 75 bp, synthetic construct
  source 1..75: mol_type = other DNA
aacgtcaagaaagatgaaaacatactcagaaactatcgttactctacgctgaaaaactatcacaaagaattaggt

SEQ ID NO: 886629 - DNA, 75 bp, synthetic construct
  source 1..75: mol_type = other DNA
atgtcgcccaggacatgctcaacatgcaaaaagcaaaactgaccggcgattatctccatacctcagccatcatcg

SEQ ID NO: 886630 - DNA, 75 bp, synthetic construct
  source 1..75: mol_type = other DNA
atcgttccccttaccacagcaatgacgcctgcaaaaatcgtcgaagttgtttcgcagatgaacgtggtagagatg

SEQ ID NO: 886631 - DNA, 75 bp, synthetic construct
  source 1..75: mol_type = other DNA
aattgttaacggcgtcgttaccgaactggatggaaaacccgccagccagtttgacctgatcgaccactttatcgc

SEQ ID NO: 886632 - DNA, 75 bp, synthetic construct
  source 1..75: mol_type = other DNA
accgtgaatggcgtaacccttgaacgccaattggtggccgatgcaagagatcagttggaaatgcaaacaggcgtc

SEQ ID NO: 886633 - DNA, 75 bp, synthetic construct
  source 1..75: mol_type = other DNA
ctatcgctaaagtgagcgaaattgtcgaaatggaaggccgtatttttatcccaccttacgatgatccgaaagtga

SEQ ID NO: 886634 - DNA, 75 bp, synthetic construct
  source 1..75: mol_type = other DNA
gcacgccggacacagaactatttttactgccgggaatggctaaccgtcacgggctgattactggcgcaacgggga

SEQ ID NO: 886635 - DNA, 75 bp, synthetic construct
  source 1..75: mol_type = other DNA
tgaagcgcggaaaaccagaacctgatgcgtatctgttaggcgcgcagctgctggggcttgcgccgcaggagtgtg

SEQ ID NO: 886636 - DNA, 75 bp, synthetic construct
  source 1..75: mol_type = other DNA
ggtagatttggtccttcatagtctggagcaaattaccgtgaccaaacagccaaatggtgacgttattattgcgtg

SEQ ID NO: 886637 - DNA, 75 bp, synthetic construct
  source 1..75: mol_type = other DNA
tgcgtatctcttaggcgcgcagttgttggggcttgcgccgcaagagtgtgtggtggtggaagatgctcccgctgg

SEQ ID NO: 886638 - DNA, 75 bp, synthetic construct
  source 1..75: mol_type = other DNA
ctggatggcaaatccgtcagtgaatttgatctgatagaccattttatcgcccgttacggtattaatctccagcgt

SEQ ID NO: 886639 - DNA, 75 bp, synthetic construct
  source 1..75: mol_type = other DNA
aatcagctgcctaatcaggtgtctgatgcaatgcaagcctggggtattgacggccaccagctgacggtagaaatc

SEQ ID NO: 886640 - DNA, 75 bp, synthetic construct
  source 1..75: mol_type = other DNA
tctctgcgccactttatggcggggaaatccgaagcggaaattgccgcagagtttacgcgtctggaacaagtcgag

SEQ ID NO: 886641 - DNA, 75 bp, synthetic construct
  source 1..75: mol_type = other DNA
ttgagaccatacgagcatgagtacgctcgccgcttagttctggggctaagtggacccttgccgcgtgaactgcgt

SEQ ID NO: 886642 - DNA, 75 bp, synthetic construct
  source 1..75: mol_type = other DNA
acatgaacgtagtgatgaccgaagacgggcgcatcattgaagtgcaggggacggcagaaggcgagccgttcaccc

SEQ ID NO: 886643 - DNA, 75 bp, synthetic construct
  source 1..75: mol_type = other DNA
gcggacgcacgatggaaatccagcgtctgattgcccgtgcattgcgtgcggcggttgatttgaaagcgttgggtg

SEQ ID NO: 886644 - DNA, 75 bp, synthetic construct
  source 1..75: mol_type = other DNA
ggcgatactttgttttctggaggatgcgggaggatatttgaaggtactccaccacagatgtatcaatcacttaaa

SEQ ID NO: 886645 - DNA, 75 bp, synthetic construct
  source 1..75: mol_type = other DNA
tacgttatcaaatatgaagtttgctttgagtattcttccgcacgatttgtccataaatgattattatcgtaaagt

SEQ ID NO: 886646 - DNA, 75 bp, synthetic construct
  source 1..75: mol_type = other DNA
atgaatcttaacagtattcccgcctttgatgacaattacatctgggttttgaatgatgaagcaggtcgctgcctg

SEQ ID NO: 886647 - DNA, 75 bp, synthetic construct
  source 1..75: mol_type = other DNA
tattgaagaaggcgtgccgcgcttcctgaaaggtcagggccagggctggatcaccgcagaatacggtatgctgcc

SEQ ID NO: 886648 - DNA, 75 bp, synthetic construct
  source 1..75: mol_type = other DNA
ataatgtagatgtccctatcccagatatgtataaacttgatgagaatagtgattgttttataaccgatttcgaga

SEQ ID NO: 886649 - DNA, 75 bp, synthetic construct
  source 1..75: mol_type = other DNA
gtgtcgcactggcagatgcgctgaataaactggttgagaatggcaagctgaaaaccaatccgatgaaagggatgg

SEQ ID NO: 886650 - DNA, 75 bp, synthetic construct
  source 1..75: mol_type = other DNA
gtgttgcactagccgatgccctgaataaactggttgaaaatggcaagctgaaaaccaacccgatgaaagggatgg

SEQ ID NO: 886651 - DNA, 75 bp, synthetic construct
  source 1..75: mol_type = other DNA
gcgtggcgctggcagatgcgctacagaagctggtggaaaacggcaagctgaaaaccaatccgatgaaagggatgg

SEQ ID NO: 886652 - DNA, 75 bp, synthetic construct
  source 1..75: mol_type = other DNA
acagcaacggaggcgttgcttaataccgttcgcgccactctgaatgcagaggatacccgcccggtggccgaccgc

SEQ ID NO: 886653 - DNA, 75 bp, synthetic construct
  source 1..75: mol_type = other DNA
ccactggccgacattgtgctcaacagtacgcaggcgtctttctgtaccgaataccgcgtcgtgaccggaggctcg

SEQ ID NO: 886654 - DNA, 75 bp, synthetic construct
  source 1..75: mol_type = other DNA
ccaccattccgccgacacctgccgttatggaatccgataccgacctgcgtctgcgcacgcaacaggcgtttgagg

SEQ ID NO: 886655 - DNA, 75 bp, synthetic construct
  source 1..75: mol_type = other DNA
atgcctgctgttgacctttcccagttaccggaccccgccattatcgcggagcctgattttgaggcaattctggct

SEQ ID NO: 886656 - DNA, 75 bp, synthetic construct
  source 1..75: mol_type = other DNA
gttacgccagcgggtcaatgagggggcacgcgcctgcatgttaagccacagcgccgggacagacctggacaacct

SEQ ID NO: 886657 - DNA, 75 bp, synthetic construct
  source 1..75: mol_type = other DNA
gacacaaaggccatgatgattgcgtcctatcctgtcgaacagcgtgaagccgtctccgccgcgctggagctggaa

SEQ ID NO: 886658 - DNA, 75 bp, synthetic construct
  source 1..75: mol_type = other DNA
cggcgcaaatttcagtgtcgggcgtcttgttatcacccctgccgatgagaccacgctgccgcccacacctgccgt

SEQ ID NO: 886659 - DNA, 75 bp, synthetic construct
  source 1..75: mol_type = other DNA
gatgtggttctgaacaaaacgcaggcggcatcatgtacgcagtggagcgtgaccaacggaggaacggatgaatag

SEQ ID NO: 886660 - DNA, 75 bp, synthetic construct
  source 1..75: mol_type = other DNA
aggccgcagaggaaaaactgaaggcatacatcagcgcacaacagcgactgggccgggacattcgtcagtcggcca

SEQ ID NO: 886661 - DNA, 75 bp, synthetic construct
  source 1..75: mol_type = other DNA
atggcaaccgttgacctgagtcagttacccgttcccgacgtggttgaggaactggactatgaaaccatccttgcg

SEQ ID NO: 886662 - DNA, 75 bp, synthetic construct
  source 1..75: mol_type = other DNA
agtgatccgcacgctggaactggaatctgaacccgtcactaaattgttgcaggagaacgcttaccgtgagttgct

SEQ ID NO: 886663 - DNA, 75 bp, synthetic construct
  source 1..75: mol_type = other DNA
acctgctggcggtggtgcgcaacgcccttaatggcgaggacgtcaggccggtggccgaccgcgtgaccgtgcagt

SEQ ID NO: 886664 - DNA, 75 bp, synthetic construct
  source 1..75: mol_type = other DNA
ggctttcagttgcggggccaactgcagcttatgaatttcatgcccgaagcgccgacggtcgggtggcggatgcca

SEQ ID NO: 886665 - DNA, 75 bp, synthetic construct
  source 1..75: mol_type = other DNA
gccagcagtaatacgcctcagacgcgtgatgaaatgctgcagcaacttgctaatgtgcgtcgccagatggaacaa

SEQ ID NO: 886666 - DNA, 75 bp, synthetic construct
  source 1..75: mol_type = other DNA
gccgcctacattaccagagcagaacaacacaatggcacagaacaagccaacgaccgcgcttccgtctgtgccggt

SEQ ID NO: 886667 - DNA, 75 bp, synthetic construct
  source 1..75: mol_type = other DNA
cggatgcttctccgggggtagcgaacaaaaccggtgtacgccgggttaacaaaaagccgatgtatatcgcgctgg

SEQ ID NO: 886668 - DNA, 75 bp, synthetic construct
  source 1..75: mol_type = other DNA
tggaagctcaaagaacttaatttcaactcattggggaaatgttcctgaggggtgggaaattaaacccttgtctta

SEQ ID NO: 886669 - DNA, 75 bp, synthetic construct
  source 1..75: mol_type = other DNA
cgctttatgtattcgcgtggttttggtgagacgaatacgacattgaatattaccggctatcgttatgccacacgc

SEQ ID NO: 886670 - DNA, 75 bp, synthetic construct
  source 1..75: mol_type = other DNA
gcgtctcccgttcctggtcataataatgagttatcatttaaccctgattttctggaattatctgatggtaacaat

SEQ ID NO: 886671 - DNA, 75 bp, synthetic construct
  source 1..75: mol_type = other DNA
atataaaggcgtttcatgggataagaaatcaagaaaatggagggcgcaaatcgtaatcaacaagaggaaagttaa

SEQ ID NO: 886672 - DNA, 75 bp, synthetic construct
  source 1..75: mol_type = other DNA
aatgccagagaatgaatgctggggatatcgcagggcataagagtagcgaaggctactgggtaataaaagtcgatg

SEQ ID NO: 886673 - DNA, 75 bp, synthetic construct
  source 1..75: mol_type = other DNA
cagcggcaaaagtcagcctgcagaggtacatagccagtcagacgcggctcggtcgggatattcgccgtagtgcca

SEQ ID NO: 886674 - DNA, 75 bp, synthetic construct
  source 1..75: mol_type = other DNA
cgtcctggctatcgattcaatatcatggtcacaaaagacctggctttcaccaagccttaccagtcctttgattac

SEQ ID NO: 886675 - DNA, 75 bp, synthetic construct
  source 1..75: mol_type = other DNA
cggatgcttctccgggggtagcaaataaaaccggtgtacgccgcgttaataaaaggccgatgtatatcgcactgg

SEQ ID NO: 886676 - DNA, 75 bp, synthetic construct
  source 1..75: mol_type = other DNA
ggacggaaaagcgcttgatttaggctccatgccgggtgcagacatggcgggttattctggtttccgtgatcaggt

SEQ ID NO: 886677 - DNA, 75 bp, synthetic construct
  source 1..75: mol_type = other DNA
ggcagatgataaacattcaaaggtggttgctaaaataaaaaagagacaattaaaagatgcgattgcatttgctaa

SEQ ID NO: 886678 - DNA, 75 bp, synthetic construct
  source 1..75: mol_type = other DNA
ttatcagagcatcagtgaatttattacccctggcggtcgtctttatgagcagcgtaaccgcgcgtgggaattgat

SEQ ID NO: 886679 - DNA, 75 bp, synthetic construct
  source 1..75: mol_type = other DNA
agcgtaaccgcgcgtgggaactgatcaacgatattccgggcgtttcctgcgtgaaacctcgtggtgcgctgtata

SEQ ID NO: 886680 - DNA, 75 bp, synthetic construct
  source 1..75: mol_type = other DNA
ctggcacctgatctgctgaccattacctttaacggactgtcgaaaacgtaccgcgttgcaggcttccgtcagggg

SEQ ID NO: 886681 - DNA, 75 bp, synthetic construct
  source 1..75: mol_type = other DNA
gtgatccggagcccagccaatgtgaccgcaacattacgggcaggcttaaagaagcgctggcactggttgatgtga

SEQ ID NO: 886682 - DNA, 75 bp, synthetic construct
  source 1..75: mol_type = other DNA
ctgctccccgcgacctccggattgacaccttatgcccaacggaccattcgacgtgctatcaacctgctggataaa

SEQ ID NO: 886683 - DNA, 75 bp, synthetic construct
  source 1..75: mol_type = other DNA
gtgacccgattcaggaactctattttgagtggattctggagcgtctgcgtggcattacccgagataaacgcatcc

SEQ ID NO: 886684 - DNA, 75 bp, synthetic construct
  source 1..75: mol_type = other DNA
catttaagcgcatgtggcgtgctcaccctggtggggaaaaattatgttatcgcccgcaaacccgaacagaacgat

SEQ ID NO: 886685 - DNA, 75 bp, synthetic construct
  source 1..75: mol_type = other DNA
ccgttggttgggccggtactggcggcgcaaatgggttacctgccggggatgatctggctgctcgccggggtggtt

SEQ ID NO: 886686 - DNA, 75 bp, synthetic construct
  source 1..75: mol_type = other DNA
tggtcaagaaatattgaaagtatcaaattggctttagataatacggttactagaaaaaagaaaaccaaagggtaa

SEQ ID NO: 886687 - DNA, 75 bp, synthetic construct
  source 1..75: mol_type = other DNA
gtgataatacttggccctgccggaagaacaactacaaaacgtatatttatcacatttgatctttctcatccggag

SEQ ID NO: 886688 - DNA, 75 bp, synthetic construct
  source 1..75: mol_type = other DNA
atcaagtggttggggatcctgatttagggggatttggtagtgtaatcaaatgccgcgattctcatcttgagagat

SEQ ID NO: 886689 - DNA, 75 bp, synthetic construct
  source 1..75: mol_type = other DNA
atggatgagttatcagcattgatgaaattaagatcaaaacatgtagtagagctttatgatgttattaattatcaa

SEQ ID NO: 886690 - DNA, 75 bp, synthetic construct
  source 1..75: mol_type = other DNA
cattacagcctgaacttttccaactgacggttatggcccagcatggtttcctgctccccgcgacctccggattga

SEQ ID NO: 886691 - DNA, 75 bp, synthetic construct
  source 1..75: mol_type = other DNA
cgactatggtggtctggaaatgtttaaagttgagtgcaactccgtccagtctctgtgtcaaagcacatcagccag

SEQ ID NO: 886692 - DNA, 75 bp, synthetic construct
  source 1..75: mol_type = other DNA
aaactgtacggcgatcttgatacattacagtcggatcttgatgaatggctggctcactataataatgagcgaacc

SEQ ID NO: 886693 - DNA, 75 bp, synthetic construct
  source 1..75: mol_type = other DNA
ggcatctgcgagcggttccataaaacaatcctgaacgaattttatcaggtaacgttccgtaaaaaactgtacggc

SEQ ID NO: 886694 - DNA, 75 bp, synthetic construct
  source 1..75: mol_type = other DNA
tgtctgtcctgccagcaagtgcgtcagataaatccttccgcgtagccagctctgatccttcaaaagcaacggtca

SEQ ID NO: 886695 - DNA, 75 bp, synthetic construct
  source 1..75: mol_type = other DNA
aatttgctaaagagaaaggtgtgaaaacctcttctactggcctggtttaccaggtagagaaagcaggctctggcg

SEQ ID NO: 886696 - DNA, 75 bp, synthetic construct
  source 1..75: mol_type = other DNA
aatttgccaaagagaaaggtgtgaaaacctcttcaactggtctggtttatcaggtagtagaagccggtaaaggcg

SEQ ID NO: 886697 - DNA, 75 bp, synthetic construct
  source 1..75: mol_type = other DNA
aggcggcatatcactctatactggcccggtgatcaccagttaccgctatacccagtatgactccagcgatgcagg

SEQ ID NO: 886698 - DNA, 75 bp, synthetic construct
  source 1..75: mol_type = other DNA
aggcggcatatcactctatactggcccggtgatcaccagataccgctatacccattatgactccagcgatgcagg

SEQ ID NO: 886699 - DNA, 75 bp, synthetic construct
  source 1..75: mol_type = other DNA
cccattatgactccagcgatgcaggtggtagttacagcaatatgatttccgtgcgtctgaatgacccgcgcgcac

SEQ ID NO: 886700 - DNA, 75 bp, synthetic construct
  source 1..75: mol_type = other DNA
atgaaagatcacagtcaaacgattgtgttccctgggaacaatgttgaatcacttgctgaggctaacgccatgttg

SEQ ID NO: 886701 - DNA, 75 bp, synthetic construct
  source 1..75: mol_type = other DNA
gtcatctggtcatctggtcatctggtcatctggtcatcggttcagagggcatagtgtcgttcgcagagcgaggct

SEQ ID NO: 886702 - DNA, 75 bp, synthetic construct
  source 1..75: mol_type = other DNA
aggcggcttatcactctatactggcccggtgatcaccagataccgctatacccagtatgactccagcgatgcagg

SEQ ID NO: 886703 - DNA, 75 bp, synthetic construct
  source 1..75: mol_type = other DNA
gtgatccagaagaaatgctgatggcctttaccagcgcagcgatgaattacagcactgtctccgaactggataagg

SEQ ID NO: 886704 - DNA, 75 bp, synthetic construct
  source 1..75: mol_type = other DNA
ccagaggcgtatacctgcatttgcgtgaaatccatcaaatctggacaagccagctttatccaatgcttaaggccg

SEQ ID NO: 886705 - DNA, 75 bp, synthetic construct
  source 1..75: mol_type = other DNA
tgacatgacactgtatgttgtgtttcttcccgtgttcccgagccagtcatcagcggcagaaaagatcgcttcgct

SEQ ID NO: 886706 - DNA, 75 bp, synthetic construct
  source 1..75: mol_type = other DNA
gagattgccgggcgtctggttgaaggcgttcgcgcgctcaaccaggacgtgctgattgattacgagcataaccag

SEQ ID NO: 886707 - DNA, 75 bp, synthetic construct
  source 1..75: mol_type = other DNA
gctatgacgagaacaccggcgaacctgtcgaacttcggatgctggctattaccggtgaccccggtctgaccggca

SEQ ID NO: 886708 - DNA, 75 bp, synthetic construct
  source 1..75: mol_type = other DNA
acaccgtaaccgtgccggataaaaagaccgccaccgctgtgctgtcggctgaagatatcgccgccgcacgtctgc

SEQ ID NO: 886709 - DNA, 75 bp, synthetic construct
  source 1..75: mol_type = other DNA
aaatccggcagctacttcgccattgaaaccttaatgagcgtagccgccattggcgcgctgtttattggcgcaacg

SEQ ID NO: 886710 - DNA, 75 bp, synthetic construct
  source 1..75: mol_type = other DNA
gtgggcgacggtattaacgacgcaccagctatgaaagccgcagccattgggattgcaatgggtaacggcacagac

SEQ ID NO: 886711 - DNA, 75 bp, synthetic construct
  source 1..75: mol_type = other DNA
ataaagtcaaagcggtgaccgagctgaatcaacatgcgccgctggcgatggtcggtgatggtattaacgacgcgc

SEQ ID NO: 886712 - DNA, 75 bp, synthetic construct
  source 1..75: mol_type = other DNA
tgcgtcaggacatgctattgccaccgaagaggatggtgatttggcatcggctgggggctatgatgctgctaagtt

SEQ ID NO: 886713 - DNA, 75 bp, synthetic construct
  source 1..75: mol_type = other DNA
ggccgtttgcttaatgggctaatggataactccagaattgccgaactgattgcgtcaggacatgctattgccacc

SEQ ID NO: 886714 - DNA, 75 bp, synthetic construct
  source 1..75: mol_type = other DNA
taacaagtaaacctaaatcttatgaagtcgcagagtctccgcacgttgtcttaccaccaatgggcattaaggctt

SEQ ID NO: 886715 - DNA, 75 bp, synthetic construct
  source 1..75: mol_type = other DNA
tgtctgctgatgaacaggcagcagtgaaggcgctcggcattacagaggctgagtatctgaaaatgaaacaggaac

SEQ ID NO: 886716 - DNA, 75 bp, synthetic construct
  source 1..75: mol_type = other DNA
ggacggctgacgtttcgcattctgaaagagctgtcccgcaccatcggcaaagagatcgtgccgggcatcctgcac

SEQ ID NO: 886717 - DNA, 75 bp, synthetic construct
  source 1..75: mol_type = other DNA
aaatccacgcgcgactgattgagcagggcagcaactttcgccagttcgccatcagtaccggctacgaaccccgga

SEQ ID NO: 886718 - DNA, 75 bp, synthetic construct
  source 1..75: mol_type = other DNA
cttaacctgccagatgacgatcctcgttggttacaagcgaaaaccctcctcgaacgccatcgaatgctacgtgac

SEQ ID NO: 886719 - DNA, 75 bp, synthetic construct
  source 1..75: mol_type = other DNA
gaggaatgtatcaagtgccagccttacaacgttacaacgttatgctgcagcttgtggtatgcacattaagttgtc

SEQ ID NO: 886720 - DNA, 75 bp, synthetic construct
  source 1..75: mol_type = other DNA
cagaatgtggtggcgaagtctttgacacatcctttaaaccgcagggctctgacagtttcgcgggagccatctgca

SEQ ID NO: 886721 - DNA, 75 bp, synthetic construct
  source 1..75: mol_type = other DNA
cgaacttccacgcggtcgtttgacttatcggattttgcgagacctttcggtcgcaataggcaaagaagttacccc

SEQ ID NO: 886722 - DNA, 75 bp, synthetic construct
  source 1..75: mol_type = other DNA
acggtcgcccgtttgatgtaacaaccggtcagggctggttcatcgacggagaaattgccggacgcctgattgaag

SEQ ID NO: 886723 - DNA, 75 bp, synthetic construct
  source 1..75: mol_type = other DNA
tgcgtccgaagtggaaccctccggccattgagcatctgcgtaataacgagttcccctggttttccccggtgattg

SEQ ID NO: 886724 - DNA, 75 bp, synthetic construct
  source 1..75: mol_type = other DNA
agggcgcatcttcaaaagcgaacgtggatacatggaaggactcggccagcagattggcgtggcggcactctcggc

SEQ ID NO: 886725 - DNA, 75 bp, synthetic construct
  source 1..75: mol_type = other DNA
cgcaaaccggtaatgaccaggcggtgaaagccgattgtgataaggtctggcaggaaattcgcagtaataacaaat

SEQ ID NO: 886726 - DNA, 75 bp, synthetic construct
  source 1..75: mol_type = other DNA
ggcgtaatgcgatggaagcggcgaactacacgtttgagcacaatgggcgtaaatgggactacgggaagtcaacgc

SEQ ID NO: 886727 - DNA, 75 bp, synthetic construct
  source 1..75: mol_type = other DNA
gcaatatgggttgtacttgtgagtttttgtgatcgtggattgcacactgtcggcatgtctgtctcccgcctggca

SEQ ID NO: 886728 - DNA, 75 bp, synthetic construct
  source 1..75: mol_type = other DNA
ttatggccgtcgccctgctggtgacgctggtgccaccgctgctgtttgccgccagctggcaggagtggatttata

SEQ ID NO: 886729 - DNA, 75 bp, synthetic construct
  source 1..75: mol_type = other DNA
tccgcattgcccagggttccggcaacatctacatcaacagccagcctgccgcccgaaaggatgaccataccgaat

SEQ ID NO: 886730 - DNA, 75 bp, synthetic construct
  source 1..75: mol_type = other DNA
gcgcatacgataaaagcagcaaggcatgtttgggaaaaagtgatggatgctgctcctggtggtgtagatgaagtt

SEQ ID NO: 886731 - DNA, 75 bp, synthetic construct
  source 1..75: mol_type = other DNA
gcgactgccggggcagtattatgatgaagagacggggctgcactataatctgttcagatattatgcgccggagtg

SEQ ID NO: 886732 - DNA, 75 bp, synthetic construct
  source 1..75: mol_type = other DNA
cagccggtggcggatatggtgcttgatgatactcaggcgtcccactgtaccggctacaccataaccgttgggggg

SEQ ID NO: 886733 - DNA, 75 bp, synthetic construct
  source 1..75: mol_type = other DNA
cctgccgggccgtctgcccgtcacctgctcgcgcttttatgccagccacctggaaacagagggactgctgggcag

SEQ ID NO: 886734 - DNA, 75 bp, synthetic construct
  source 1..75: mol_type = other DNA
cggaaatccctgactggttgcgtcaggtagtggatgtgctgtttgtggttgccggaatggttggcggacttgccg

SEQ ID NO: 886735 - DNA, 75 bp, synthetic construct
  source 1..75: mol_type = other DNA
atgctcgaaagccgggttcgcgatgcaacggctgcgtatatgcgtggcgttgaatttcctaacccgcctggtgag

SEQ ID NO: 886736 - DNA, 75 bp, synthetic construct
  source 1..75: mol_type = other DNA
ctgcattgtcccagtggtcggcaaacaatgcgaccgcattcatccaaagtaatggcgagttaagtgatactgctg

SEQ ID NO: 886737 - DNA, 75 bp, synthetic construct
  source 1..75: mol_type = other DNA
cgagcaaatacaggccaagaaaatcgagtttaaagagaaggttgctgatgcagcattgtcccagtggtcggcaaa

SEQ ID NO: 886738 - DNA, 75 bp, synthetic construct
  source 1..75: mol_type = other DNA
gatgaagagacggggctgcactataatctgttcaggtattatgcgccggagtgcgggaggttcgtaagccaggac

SEQ ID NO: 886739 - DNA, 75 bp, synthetic construct
  source 1..75: mol_type = other DNA
cgtcccggtaacctggtggaatatcgttacgatgataacgggcaactgaccggtgtggtgaaccgggccggtgtg

SEQ ID NO: 886740 - DNA, 75 bp, synthetic construct
  source 1..75: mol_type = other DNA
cataaacggggttttggtatatgggaacgctgcacgatcatatgtgggtacgctgcacggtgcaaaaaacgacca

SEQ ID NO: 886741 - DNA, 75 bp, synthetic construct
  source 1..75: mol_type = other DNA
tctggcggtcaatttcaacgttgaacgtctgaccattcaggaagaagacgacagcgttacaccgccaattgaagc

SEQ ID NO: 886742 - DNA, 75 bp, synthetic construct
  source 1..75: mol_type = other DNA
cgccagaagtgatgattgcaggcaatcctgacattcagcaggcgcagaagctgatcgccgccgcatccggtaaag

SEQ ID NO: 886743 - DNA, 75 bp, synthetic construct
  source 1..75: mol_type = other DNA
gccgatggtcgtgtcgcggatgcctcagcgaacagcccggccccggcagaggtcactgtcgccgtgctgtcgcgg

SEQ ID NO: 886744 - DNA, 75 bp, synthetic construct
  source 1..75: mol_type = other DNA
ctggtcattactcccgaagacgatacccaaatcccgccggtggcggcggtcatggaatccgacagcgatttacgc

SEQ ID NO: 886745 - DNA, 75 bp, synthetic construct
  source 1..75: mol_type = other DNA
ccgccatgaaagctgccgccatagggattgcaatgggcagtggcacagatgtggcgctggaaaccgccgacgcag

SEQ ID NO: 886746 - DNA, 75 bp, synthetic construct
  source 1..75: mol_type = other DNA
attccctgcgcgatgaacaggccgccgacgaaccgcaagcatcacgcctgaaagagaatttgccgctgattacgc

SEQ ID NO: 886747 - DNA, 75 bp, synthetic construct
  source 1..75: mol_type = other DNA
aaaacatcggtagctcgctatgtcttctgtcttgctttcgtaaaacgcatggaagaggaatatgggcgcgtacca

SEQ ID NO: 886748 - DNA, 75 bp, synthetic construct
  source 1..75: mol_type = other DNA
ttcatccgaaagatgagcaggaagcagtgatccgcacgctggaactggaatctgaacccgtcaccaaattgctgc

SEQ ID NO: 886749 - DNA, 75 bp, synthetic construct
  source 1..75: mol_type = other DNA
tcggcagacgggcgcgtagctgatatttcggcggtcagtcctacacctgcttgcgtcaccatttcggtgctgtcg

SEQ ID NO: 886750 - DNA, 75 bp, synthetic construct
  source 1..75: mol_type = other DNA
cgcacgcgtacccagcaggcttttgaaggtctgagcgtggccgggccaactgcggcgtatgaattttgggggcgt

SEQ ID NO: 886751 - DNA, 75 bp, synthetic construct
  source 1..75: mol_type = other DNA
aaagtgtggtatgacacgccgaccgatgattataacggcctgcaattcgctgccaatctgacctggaaattctga

SEQ ID NO: 886752 - DNA, 75 bp, synthetic construct
  source 1..75: mol_type = other DNA
tgatgtcgaagtcgatgcctggcaaggcggcgtatcactctatactggcccggtgatcaccagctatcgctatac

SEQ ID NO: 886753 - DNA, 75 bp, synthetic construct
  source 1..75: mol_type = other DNA
cttaatctggggctaacggcaggtaaagtgtggtacgacacaccaaccgatgattataacggtctgcaactcgca

SEQ ID NO: 886754 - DNA, 75 bp, synthetic construct
  source 1..75: mol_type = other DNA
tgaattcgagtcgagtaataataagaactgtagtttttatgatattttgatttctgaaatattaccacaaataca

SEQ ID NO: 886755 - DNA, 75 bp, synthetic construct
  source 1..75: mol_type = other DNA
agcacctcaaaaacaccatcatacactaaatcagtaagttggcagcatcacccgattttaaatgaggaaaagcaa

SEQ ID NO: 886756 - DNA, 75 bp, synthetic construct
  source 1..75: mol_type = other DNA
tcgcgctgctggcggtggtgatgacgctcatgatggcgccgggtcatctgctgctgctgcagattctccagtgtc

SEQ ID NO: 886757 - DNA, 75 bp, synthetic construct
  source 1..75: mol_type = other DNA
gccagcatcagggaacaactgaaacacttcgtttactcgcagaacaaactaaccgccagattcaggatatgcata

SEQ ID NO: 886758 - DNA, 75 bp, synthetic construct
  source 1..75: mol_type = other DNA
gcgatgcgggtcgctgccgcggggagtccgcaggatgatctggatggactgccggatatcatccagcccccggac

SEQ ID NO: 886759 - DNA, 75 bp, synthetic construct
  source 1..75: mol_type = other DNA
tatttcaatatgtctgttgtactgtggtttttatttacgggtatacttccatgtggactattgttgttagtaaat

SEQ ID NO: 886760 - DNA, 75 bp, synthetic construct
  source 1..75: mol_type = other DNA
ttatggcgggattcagtcacgtcaccggcgacttaattattaccctcgatgccgatctccagaatccgccaggac

SEQ ID NO: 886761 - DNA, 75 bp, synthetic construct
  source 1..75: mol_type = other DNA
ggcgtattcagccaactggagtcagggcaaaaacagatgagccagactcaggaacaggggcaacgcgtgctgcat

SEQ ID NO: 886762 - DNA, 75 bp, synthetic construct
  source 1..75: mol_type = other DNA
aatggcgcaaaacaccacgcgccatctggaagagatacaaacaggagccgacaaaatgcgcgtggccgccgaccg

SEQ ID NO: 886763 - DNA, 75 bp, synthetic construct
  source 1..75: mol_type = other DNA
ccgctggataaaattgctggtgtggtgcaaaccgcctccggcgatcagagccatcgtgtgcagtcgatgctggag

SEQ ID NO: 886764 - DNA, 75 bp, synthetic construct
  source 1..75: mol_type = other DNA
aaatacacgcgatcaattaccagcattgaaaaaagtgcgccagaggtccagcttgagcaccttaagagcctgttt

SEQ ID NO: 886765 - DNA, 75 bp, synthetic construct
  source 1..75: mol_type = other DNA
tggcgcttacgtctgtggaaccccattgggttcctttcaccgttatcggcctcgttacctttgcctttgtctgct

SEQ ID NO: 886766 - DNA, 75 bp, synthetic construct
  source 1..75: mol_type = other DNA
atgaagccatttctattgtgaaaaggaagattattccgttagcatttattctgtatttttttaactatatggatc

SEQ ID NO: 886767 - DNA, 75 bp, synthetic construct
  source 1..75: mol_type = other DNA
aatccaggaacgttatggtatcagaaagatcaggcagaaaaagaggtcgtggattgggaaacccgcaatgaatat

SEQ ID NO: 886768 - DNA, 75 bp, synthetic construct
  source 1..75: mol_type = other DNA
gttaacggcaatgatggcggccaatggaatagtagcaatattgcgaatcagcaagatcagaacgcggacagcgcc

SEQ ID NO: 886769 - DNA, 75 bp, synthetic construct
  source 1..75: mol_type = other DNA
tgctcaagtggatgcagtctaaatacagactttcgaaccggaaggctcagcgaaagctgacgctggtaaggaagg

SEQ ID NO: 886770 - DNA, 75 bp, synthetic construct
  source 1..75: mol_type = other DNA
agctgagagtttgctggattttgcgaggcgctacaattcgatagtgagagactggatcgagtactacggaaaatt

SEQ ID NO: 886771 - DNA, 75 bp, synthetic construct
  source 1..75: mol_type = other DNA
cctcaaccgctatcgtctgcgacatatggcgaaacagggtaatcgctcggccaaacgcgtcgaaaaattgctgcg

SEQ ID NO: 886772 - DNA, 75 bp, synthetic construct
  source 1..75: mol_type = other DNA
gcgaacattaatcaaagctggaacgaaagtaactttgccaaccagcaagaccagcagattgatgttgctgcgcaa

SEQ ID NO: 886773 - DNA, 75 bp, synthetic construct
  source 1..75: mol_type = other DNA
atgtctgaacagaatgttaatccgtacctttccggtgctgatgctgcaccgcagcaatcgccatatatggctgcg

SEQ ID NO: 886774 - DNA, 75 bp, synthetic construct
  source 1..75: mol_type = other DNA
agggcatgacagcatacatctggttctggagctgacggagcagcagccgtttaacatggacagacagaccgaaga

SEQ ID NO: 886775 - DNA, 75 bp, synthetic construct
  source 1..75: mol_type = other DNA
gttgcctgtgacggaaaaaatcctgaaccgtgcggtggcagggctttcggaggttaaagccatgctgccgcgtgg

SEQ ID NO: 886776 - DNA, 75 bp, synthetic construct
  source 1..75: mol_type = other DNA
cgcaggaaaatgagtattcagactttgcaaactatccccaaccaacgttgcaaacggcaatagtagccaattcgt

SEQ ID NO: 886777 - DNA, 75 bp, synthetic construct
  source 1..75: mol_type = other DNA
gctttcgctgctgataaacgcagtatctattttgatggtcagcgtaccgatgataatagcggtgataagcaggtg

SEQ ID NO: 886778 - DNA, 75 bp, synthetic construct
  source 1..75: mol_type = other DNA
tgcccgccgatcgcaaaacttttcagattaaacgttggatgcctggtgaacggttggtttatcgcgataaaagcg

SEQ ID NO: 886779 - DNA, 75 bp, synthetic construct
  source 1..75: mol_type = other DNA
ccggacgttaatttttcccgcctctggcgtattgccaatttagccaataaacaagattgtcgcttactgtccgat

SEQ ID NO: 886780 - DNA, 75 bp, synthetic construct
  source 1..75: mol_type = other DNA
acgctgatgtcgctttcatcgcctttgcaggccggtgtcgacttcaccctctttcaatgtactgacgcggcaatc

SEQ ID NO: 886781 - DNA, 75 bp, synthetic construct
  source 1..75: mol_type = other DNA
aggcattatcggtttgccggccaacctgttttatggcaccggcattcctgcctgtattatcgtgattgataaaga

SEQ ID NO: 886782 - DNA, 75 bp, synthetic construct
  source 1..75: mol_type = other DNA
attttgccgtggcgaacccgcctttttccaataaaaactggaccaacgggttgacgccgaaaaaagatccgtttg

SEQ ID NO: 886783 - DNA, 75 bp, synthetic construct
  source 1..75: mol_type = other DNA
gcgctacaaggccgatgtgctgccccgttcgctggtggaaattcgctgtttcccggaactgctggatgcgctgaa

SEQ ID NO: 886784 - DNA, 75 bp, synthetic construct
  source 1..75: mol_type = other DNA
aacctgttttacggcaccggcattcctgcctgtattatcgtcatcgacaaagagcacgcgcagcaaagagccctc

SEQ ID NO: 886785 - DNA, 75 bp, synthetic construct
  source 1..75: mol_type = other DNA
caaaggcataatcggtttaccggccaacctgttttacggcaccggcattcctgcctgtattatcgtcatcgacaa

SEQ ID NO: 886786 - DNA, 75 bp, synthetic construct
  source 1..75: mol_type = other DNA
gaaaggcgacaaagaaatcggcgataaaatcaataaaatcatcagcgcgctggccgaagaaaacgacctcaaagg

SEQ ID NO: 886787 - DNA, 75 bp, synthetic construct
  source 1..75: mol_type = other DNA
tattatggttgtcggacaaacctgtgcggggaaagcaaatctgactgcagagttaatttctgctgttgtggggaa

SEQ ID NO: 886788 - DNA, 75 bp, synthetic construct
  source 1..75: mol_type = other DNA
atcagatgattttatgcatgctgttctcagtaactgcaccacaaaaatagttcttcctgcaccggagaaattcag

SEQ ID NO: 886789 - DNA, 75 bp, synthetic construct
  source 1..75: mol_type = other DNA
gaacatgcgtaatattaatattattactgcacgctctgtaccggataaaagcgtatcagatgattttatgcatgc

SEQ ID NO: 886790 - DNA, 75 bp, synthetic construct
  source 1..75: mol_type = other DNA
attactcccgatacgccgcgagatgcaacggtttatgacccaacctgtggctctggttcgctgctgttgaaagtg

SEQ ID NO: 886791 - DNA, 75 bp, synthetic construct
  source 1..75: mol_type = other DNA
tgaccatttatggccaagagatggattatgcgaccagcgcactggcacgcatgaacatgatccttcatgacaacg

SEQ ID NO: 886792 - DNA, 75 bp, synthetic construct
  source 1..75: mol_type = other DNA
ttacagccctttctgtaccgggtaaaactatgtcagatgattttatgcatgctgttctcagtaactgcaccacaa

SEQ ID NO: 886793 - DNA, 75 bp, synthetic construct
  source 1..75: mol_type = other DNA
caatacccccaactcagcatcgatgagatcaaatccatgattgtggacgataaatggctggcaacacttgaacgt

SEQ ID NO: 886794 - DNA, 75 bp, synthetic construct
  source 1..75: mol_type = other DNA
ccgccatatcttaaagcaatggctgatttgctggcgcacggtcgtccggccagcgacattatgcaggcgcatttg

SEQ ID NO: 886795 - DNA, 75 bp, synthetic construct
  source 1..75: mol_type = other DNA
ctctgttccacctctgatgaaaccattgaagaagcggagaaagatctgccgcgcaacctctgcccgctgattaaa

SEQ ID NO: 886796 - DNA, 75 bp, synthetic construct
  source 1..75: mol_type = other DNA
gcgaaagcgaccgagcaatgcgtggcagaaacgggcgatgtctacgacgcgctggcggataaatatctggcgatt

SEQ ID NO: 886797 - DNA, 75 bp, synthetic construct
  source 1..75: mol_type = other DNA
gtttatttgggcgccgtggatcgaacgctggcgacttccgcccggtagccaggaacgccgttcgcggatgttaat

SEQ ID NO: 886798 - DNA, 75 bp, synthetic construct
  source 1..75: mol_type = other DNA
agttttgtctcttatgcccgtgagtttttgggtgagaaagccgcttatgttgctggctggatgtacttcatcaac

SEQ ID NO: 886799 - DNA, 75 bp, synthetic construct
  source 1..75: mol_type = other DNA
tcgaaggccgcgcccgtacggtggaagcggcagttcacgagctgggtgactatttgattggtcaggatccatcgc

SEQ ID NO: 886800 - DNA, 75 bp, synthetic construct
  source 1..75: mol_type = other DNA
aagctcaaagagaacgcgccgtaggtaattttatttatggttctgatggtggtcataaccccgctccgttgaaat

SEQ ID NO: 886801 - DNA, 75 bp, synthetic construct
  source 1..75: mol_type = other DNA
caatgcaagacgatgtgtatgtgctagtgcaagacggctggccagcaggcaacgtgctgcgtgagttggtggtga

SEQ ID NO: 886802 - DNA, 75 bp, synthetic construct
  source 1..75: mol_type = other DNA
gagccactgcctgctcttacccaatcagtagaaaacttgagcgataaagtcgcaggtcacttaaaagctatgggc

SEQ ID NO: 886803 - DNA, 75 bp, synthetic construct
  source 1..75: mol_type = other DNA
cggaaacgggtgatgtgtacgacgcgctggcggataaatatctggcgattggctgctcctgtgtttcgccgaacg

SEQ ID NO: 886804 - DNA, 75 bp, synthetic construct
  source 1..75: mol_type = other DNA
aagaacgttttgggcacgagattagcgaagatgctctgcgcgatgccattgcgctgaaaaaccgcgaacgtcgcg

SEQ ID NO: 886805 - DNA, 75 bp, synthetic construct
  source 1..75: mol_type = other DNA
tggcggcgcagcagaaaaagtggtgcgcgcgattgaagagaatggcggctgggttgtcggttatgaaaactgcac

SEQ ID NO: 886806 - DNA, 75 bp, synthetic construct
  source 1..75: mol_type = other DNA
ctggagattgcgctgaaaattgtgcgtaatgccgacggcaccgaatccgccagcgaacagctttaccaggtcgtt

SEQ ID NO: 886807 - DNA, 75 bp, synthetic construct
  source 1..75: mol_type = other DNA
tggttgaactggcacaaaccgacccgaaccgttgcgccgtcctgtgcgctaaccttggcggcgacacagacacca

SEQ ID NO: 886808 - DNA, 75 bp, synthetic construct
  source 1..75: mol_type = other DNA
tctggcggttgcgggggcggtagtcatcgcatgggcgatttctcgtgccattgacggagaaagctggtcagcgat

SEQ ID NO: 886809 - DNA, 75 bp, synthetic construct
  source 1..75: mol_type = other DNA
cctcggacgctttgccgataagctgccgtcagaaccacgggaaaatatcgtttatcagtgctgggagcgtttttg

SEQ ID NO: 886810 - DNA, 75 bp, synthetic construct
  source 1..75: mol_type = other DNA
gtgtctggcggatgcgttgctggaacgtaaaggcaagatcgatccggatctgattgggcgtaatattctcgactg

SEQ ID NO: 886811 - DNA, 75 bp, synthetic construct
  source 1..75: mol_type = other DNA
aggtaaacctgttgccgaactcgaaaacaacggcgtgaccaacggcgcggcaatgcgagtgtctccgctgggatg

SEQ ID NO: 886812 - DNA, 75 bp, synthetic construct
  source 1..75: mol_type = other DNA
cactgcgtcgtggtgaagtgctcggtattgctggcctgctgggagccgggcgcagtgaattgctgaaagcgattg

SEQ ID NO: 886813 - DNA, 75 bp, synthetic construct
  source 1..75: mol_type = other DNA
caatggtccaccatccgccgcctgaccgaagaggtgatgcagcggatgacggtcaaggctgccagtagcgaaacg

SEQ ID NO: 886814 - DNA, 75 bp, synthetic construct
  source 1..75: mol_type = other DNA
gtaagaactacctgcaaaatcaggaaggttttgttcatatttgccggctggatacggcgggcgcacacgagtact

SEQ ID NO: 886815 - DNA, 75 bp, synthetic construct
  source 1..75: mol_type = other DNA
aataacggcgtgaccaacggcgcagcgatgcgcgtctcgccattaggttgtttgcttccggcgcgcgatgttgat

SEQ ID NO: 886816 - DNA, 75 bp, synthetic construct
  source 1..75: mol_type = other DNA
cgtgaaggcaagatcgatccggatctgattgggcgtaatattctcgactgggcgctgcgtttcgacgcctttaac

SEQ ID NO: 886817 - DNA, 75 bp, synthetic construct
  source 1..75: mol_type = other DNA
tggggtgagtatgtagaagcagcatcctttggaaactcatcaatcagtgttattggcaagttaacctcaacagaa

SEQ ID NO: 886818 - DNA, 75 bp, synthetic construct
  source 1..75: mol_type = other DNA
tccttgccggatgctgggcccacgccagaaggggcttcgccgacctgtataaaatgaacaaagatctacaggcag

SEQ ID NO: 886819 - DNA, 75 bp, synthetic construct
  source 1..75: mol_type = other DNA
ggaagccaatgttagcgaaccgacggtgaatcgtttctgtcgcagcatggacacacgcggttttcctgattttaa

SEQ ID NO: 886820 - DNA, 75 bp, synthetic construct
  source 1..75: mol_type = other DNA
gcagcccgtcgggggattatttctgacaggtttgtagaagcaattttgcgtttgtcacattttcacaaagaatag

SEQ ID NO: 886821 - DNA, 75 bp, synthetic construct
  source 1..75: mol_type = other DNA
agaacagcgtctgtatgtcctgtcatctgccggaacagttgcaaattgtcatttggcatattacgaacaattccg

SEQ ID NO: 886822 - DNA, 75 bp, synthetic construct
  source 1..75: mol_type = other DNA
taagatcttaatccaggcaccgggttaccggtatgaacagagcaatccagagcagcaaccgctgtggcattacga

SEQ ID NO: 886823 - DNA, 75 bp, synthetic construct
  source 1..75: mol_type = other DNA
ttgaaggcaagggattgttccgccataagatcttaatccaggcaccgggttaccggtatgaacagagcaatccag

SEQ ID NO: 886824 - DNA, 75 bp, synthetic construct
  source 1..75: mol_type = other DNA
cgaactggcgcagctggtgcgagaaaacgatgctatggtaatcgccctcacttccacgggaacaccgctcgccca

SEQ ID NO: 886825 - DNA, 75 bp, synthetic construct
  source 1..75: mol_type = other DNA
catgtgaaagaacaagatctggtgcaaccgttcgtggaaggcctggccgatatcgtcgatatggcggcgattcag

SEQ ID NO: 886826 - DNA, 75 bp, synthetic construct
  source 1..75: mol_type = other DNA
tttgctaacgacccggattatgaccgtcacggtattgtcactccggctgggttgatgaacccgaaccattacctg

SEQ ID NO: 886827 - DNA, 75 bp, synthetic construct
  source 1..75: mol_type = other DNA
gtggcccactggcagatggtattgtgattacgccgtcccataacccgccggaagatggtggtatcaaatacaacc

SEQ ID NO: 886828 - DNA, 75 bp, synthetic construct
  source 1..75: mol_type = other DNA
ggaaggcagcaaaaagccctcgtccgacacgccaacgcatctggcgctttaccgtcgctatgccgaaatcggtgg

SEQ ID NO: 886829 - DNA, 75 bp, synthetic construct
  source 1..75: mol_type = other DNA
ggtgcattctcacggcccgttcgcctggggaaaaaacgccgccgatgcggtgcataatgccgtagtgctggaaga

SEQ ID NO: 886830 - DNA, 75 bp, synthetic construct
  source 1..75: mol_type = other DNA
gcacgctgattatttctatggtgccatcccctgcacgcgacagatgaccgcagaggagattaacggcgaatatga

SEQ ID NO: 886831 - DNA, 75 bp, synthetic construct
  source 1..75: mol_type = other DNA
cgatgaatgaacactgcggcaagccgcttaatgacacccgtttgctggctttgatgggcgagctggaaggccgta

SEQ ID NO: 886832 - DNA, 75 bp, synthetic construct
  source 1..75: mol_type = other DNA
gctgcaatcctcaatccaaaccgagtggaaaaagcaggaaaaagatttccagcagtttggcaaagatgtttgtag

SEQ ID NO: 886833 - DNA, 75 bp, synthetic construct
  source 1..75: mol_type = other DNA
tttggcaaagatgtctgtagccgtgtggtgaccctggaagatagccgcaaagccctggtcgggaatttgaaataa

SEQ ID NO: 886834 - DNA, 75 bp, synthetic construct
  source 1..75: mol_type = other DNA
ggcgcgaaagcggtactgaaaagcggcggtaatccgttacagaatgtgctgggaagcctgggcggtttgcaatcc

SEQ ID NO: 886835 - DNA, 75 bp, synthetic construct
  source 1..75: mol_type = other DNA
caaatatcacagcgactggatctctaacgccaacaaagtccgggtgatttactggcaaatgaccggcgataaagc

SEQ ID NO: 886836 - DNA, 75 bp, synthetic construct
  source 1..75: mol_type = other DNA
gttctgctatcacccgctgtttggcaacttcctgcgccagcgctgccagtgggaactggcggcggagctgccgga

SEQ ID NO: 886837 - DNA, 75 bp, synthetic construct
  source 1..75: mol_type = other DNA
atcgtaccggatttatcagtcactttgtcatcgaaggcgaagcgatggcgcaacagttacgccaactgattcaac

SEQ ID NO: 886838 - DNA, 75 bp, synthetic construct
  source 1..75: mol_type = other DNA
gcgctgcggacgaaatctattttgtgccggaaggcacgccgctcagtacccaattagttaaatttcaacgcaata

SEQ ID NO: 886839 - DNA, 75 bp, synthetic construct
  source 1..75: mol_type = other DNA
gtcacgccgcaaaacgacggttcggtgattattgatggcaccgccaacgtgcgggaaatcaacaaagcctttaac

SEQ ID NO: 886840 - DNA, 75 bp, synthetic construct
  source 1..75: mol_type = other DNA
gatgtcgccaacacttgccgaagaagtcactccgcaaaacgacggttcggtgattatcgatggcaccgccaacgt

SEQ ID NO: 886841 - DNA, 75 bp, synthetic construct
  source 1..75: mol_type = other DNA
aaagcactggtgacagggggcgattccggaataggtcgcgctgccgccatcgcttacgcgcgtgaaggggctgac

SEQ ID NO: 886842 - DNA, 75 bp, synthetic construct
  source 1..75: mol_type = other DNA
agtgaattttcatcctttgacgaaggtccaggctatttcagtgaccgtgccgacttcatctgggaattagttaaa

SEQ ID NO: 886843 - DNA, 75 bp, synthetic construct
  source 1..75: mol_type = other DNA
tacgcaccattgtgcacgaatcgcggtcacaaatttcccgtcgcaatcaggatatgctgttgtcggtactcgatc

SEQ ID NO: 886844 - DNA, 75 bp, synthetic construct
  source 1..75: mol_type = other DNA
gatttactccggttacagcaatgagcaaattgcaggcgagctggaagtggcggcaaccaccatcaaaacgcatat

SEQ ID NO: 886845 - DNA, 75 bp, synthetic construct
  source 1..75: mol_type = other DNA
gagccgaacacgagctccaggacatcagagaaggcaccatgcatgcagagttcaacgccctgcgcgcccaggtgg

SEQ ID NO: 886846 - DNA, 75 bp, synthetic construct
  source 1..75: mol_type = other DNA
gcgctctctgcgcggcaaaatacccactcggcccataaatcagcgcgccgtctggcgggcatcaatgccagccat

SEQ ID NO: 886847 - DNA, 75 bp, synthetic construct
  source 1..75: mol_type = other DNA
aacggatggatgatactggcgaatggttcagctatcacccgctgtttggcaacttcctgcgccaacgctgccagt

SEQ ID NO: 886848 - DNA, 75 bp, synthetic construct
  source 1..75: mol_type = other DNA
gaaattgccgatggcaaattgcatatcgtccaggaaggacgggtaaataaatttattcgggaactaccggaaatt

SEQ ID NO: 886849 - DNA, 75 bp, synthetic construct
  source 1..75: mol_type = other DNA
ggcacaggaagcggtgaattatattcccgacgaagcaacactttgtgtgttaggcgctggcggcggtattctgga

SEQ ID NO: 886850 - DNA, 75 bp, synthetic construct
  source 1..75: mol_type = other DNA
actcggcgcataaatcagcgcgtcgtctggcgggcatcaatgccagtcatctttctgattatctggtcgatgagg

SEQ ID NO: 886851 - DNA, 75 bp, synthetic construct
  source 1..75: mol_type = other DNA
attcggcgcatcagtcagcaaggcgcctctcaggtattaatgccagccatctttcggattatctggtggatgagg

SEQ ID NO: 886852 - DNA, 75 bp, synthetic construct
  source 1..75: mol_type = other DNA
gccatcaaccagaaaatctcaccctggtggtgttgtcacgcaatcttccgcaactgggcattgccaatctgcgtg

SEQ ID NO: 886853 - DNA, 75 bp, synthetic construct
  source 1..75: mol_type = other DNA
actggaagagtcgctgaaagccctgccgtgggacagtctgctggaaaatccacaactggtgttgttacaggcctg

SEQ ID NO: 886854 - DNA, 75 bp, synthetic construct
  source 1..75: mol_type = other DNA
gagtttgcgaacaaccacttcctgcaaggtcaatggcgcaacattgcccgtgcacaaatcttgctgggcgagttt

SEQ ID NO: 886855 - DNA, 75 bp, synthetic construct
  source 1..75: mol_type = other DNA
taaattcgcccatttcgatgagaatttcgttgaacgtctgctaaatcatccggaagtgccagaactgatccgcac

SEQ ID NO: 886856 - DNA, 75 bp, synthetic construct
  source 1..75: mol_type = other DNA
gttgaaaagcgccattttgcgctcaatgaacgatgcactcatcacccgtgtgaccggcgaagaaaacgggcaaat

SEQ ID NO: 886857 - DNA, 75 bp, synthetic construct
  source 1..75: mol_type = other DNA
ggtcggttatgaaaactgcacgggggcaaaagcgactgagcaatgtgtggcggaaacgggcgatgtctatgatgc

SEQ ID NO: 886858 - DNA, 75 bp, synthetic construct
  source 1..75: mol_type = other DNA
cgccggatggtcgtcaggcactgcaacaggcaagattgcaggcgactactggtcatgcagaagaagctgtggcga

SEQ ID NO: 886859 - DNA, 75 bp, synthetic construct
  source 1..75: mol_type = other DNA
acaggcacgattgcaggcgacgaccggtcatgcagaagaagctgtggcgagttacaacaaactgttcaacggtgc

SEQ ID NO: 886860 - DNA, 75 bp, synthetic construct
  source 1..75: mol_type = other DNA
aaaaacagggcaaagatgcgctggtggttggctggaatattcaggataccacccgtctgtggctggaaggttgga

SEQ ID NO: 886861 - DNA, 75 bp, synthetic construct
  source 1..75: mol_type = other DNA
tgcgaacgtggatcaaagagcgcggtcaggattaccccgcccagacactcaccacacatctgtttattcctctgc

SEQ ID NO: 886862 - DNA, 75 bp, synthetic construct
  source 1..75: mol_type = other DNA
cgaacctccgcccaacagcagcaactcaccagttggcaggaacaaggccatgatattttcccactcggcatttaa

SEQ ID NO: 886863 - DNA, 75 bp, synthetic construct
  source 1..75: mol_type = other DNA
ataaataatatgcttatagacctgatggccgcgatgtcgcataaggactggctgagtcgtcgccaacgccaaaaa

SEQ ID NO: 886864 - DNA, 75 bp, synthetic construct
  source 1..75: mol_type = other DNA
gattacccgcgcagtgataactgcaataaataatatgcttatagacctgatggccgcgatgtcgcataaggactg

SEQ ID NO: 886865 - DNA, 75 bp, synthetic construct
  source 1..75: mol_type = other DNA
atgttcatcagagcttatttaagggcatcgacggaagatcagttcgccgatcgggcaaaagagatgctggagcag

SEQ ID NO: 886866 - DNA, 75 bp, synthetic construct
  source 1..75: mol_type = other DNA
gacaacgcagccaggccgatacgttaatgcgcaatctggcgcagcagaagtcgaacgacccagagcaggtttacg

SEQ ID NO: 886867 - DNA, 75 bp, synthetic construct
  source 1..75: mol_type = other DNA
ctcgctctctgccagccagcggcgcagcattgatgatatcgaacgcagcctgcaaaacgaccgtctggcacagca

SEQ ID NO: 886868 - DNA, 75 bp, synthetic construct
  source 1..75: mol_type = other DNA
tcagcattagagaaacagcagacgcaacgggctacagcacttcgcaggtttgccgtattcaggcactttatcgag

SEQ ID NO: 886869 - DNA, 75 bp, synthetic construct
  source 1..75: mol_type = other DNA
tccctaaaagtaaaagaaaatgccaataatgaactaacaaacaccattgaaaaaatggatggtatcaataaacaa

SEQ ID NO: 886870 - DNA, 75 bp, synthetic construct
  source 1..75: mol_type = other DNA
acgaagaaggcaacagtgttcgcggtcaaaaaatggtggcatcggtcgctaagcaactcggctataacgtgttta

SEQ ID NO: 886871 - DNA, 75 bp, synthetic construct
  source 1..75: mol_type = other DNA
tcatatgatgaatctaaactccaagaaatagtaacgtaccttaacgattatttagtagaagccgtaagctgtcat

SEQ ID NO: 886872 - DNA, 75 bp, synthetic construct
  source 1..75: mol_type = other DNA
gacagtgcatatgtctgctgatgcccgggcatggaaaaaagcgaaactgcgcagccatggcgttacggtcgtgga

SEQ ID NO: 886873 - DNA, 75 bp, synthetic construct
  source 1..75: mol_type = other DNA
aaagtggtctacggcgcaaccttccggttcgataaagaggcgttgatcaatgaactggacgcgatgacagcccgc

SEQ ID NO: 886874 - DNA, 75 bp, synthetic construct
  source 1..75: mol_type = other DNA
gcgttgatcaatgaactggatgcaatgaccgcccgcgttcgtcagcagtgggaagaaggccagcgactgggcccg

SEQ ID NO: 886875 - DNA, 75 bp, synthetic construct
  source 1..75: mol_type = other DNA
atgcaatggaagcctgtgacgtgtacacccgtcagtgctccacgctcatcaatactattgaactggcaacgcttg

SEQ ID NO: 886876 - DNA, 75 bp, synthetic construct
  source 1..75: mol_type = other DNA
tcgtggaatatgagcaagattatggtgttgctgtcgaggaaggacgtaaagcagcgcagtctgacccgaactgtt

SEQ ID NO: 886877 - DNA, 75 bp, synthetic construct
  source 1..75: mol_type = other DNA
cgggcaatggagcgtctactggatggcttctatacccttagcgatcaaaccatgtatgacatgcttggctggctg

SEQ ID NO: 886878 - DNA, 75 bp, synthetic construct
  source 1..75: mol_type = other DNA
aagccagttggcgctatccctgcaatgcagacaagagaagggcgctttatttttaccgtagcttttcaaaccatc

SEQ ID NO: 886879 - DNA, 75 bp, synthetic construct
  source 1..75: mol_type = other DNA
gcagcgcagtctgacccgaactgtttctttattgatgacgagaattcccgcacgttgttccttggatattccgtc

SEQ ID NO: 886880 - DNA, 75 bp, synthetic construct
  source 1..75: mol_type = other DNA
tgctgataaccctctatttgtctatctgccgtgtggtgttggcggtggtcctggtggcgtcgcattcggacttaa

SEQ ID NO: 886881 - DNA, 75 bp, synthetic construct
  source 1..75: mol_type = other DNA
tgcttttttgccgaaccaacacactccccgtgtatgttattaggcgtccataccggattacacgatcagatttct

SEQ ID NO: 886882 - DNA, 75 bp, synthetic construct
  source 1..75: mol_type = other DNA
gacgcacgacgacgcgtcagatcataactgtttcagtcaacgacctcgactcttttggtcagggcgtggcacgac

SEQ ID NO: 886883 - DNA, 75 bp, synthetic construct
  source 1..75: mol_type = other DNA
atggacgttaatccgcaaagagttgcagtcgctgctgcgcgaaccgcaaaccgcgcgattctgattttacctgtg

SEQ ID NO: 886884 - DNA, 75 bp, synthetic construct
  source 1..75: mol_type = other DNA
gtaatattatttgatgaatttgaaaaggttcgttcagtgattaacagtaataatacagatccagtgattgattct

SEQ ID NO: 886885 - DNA, 75 bp, synthetic construct
  source 1..75: mol_type = other DNA
cggacgcaaaacaaggacgacttaataaatgtacagggacaattagacgtattggatcagaccctacaagaagtt

SEQ ID NO: 886886 - DNA, 75 bp, synthetic construct
  source 1..75: mol_type = other DNA
gaaaacactgtcgcgtcactcggatacggcaaaagcgttcgcatacctgctgttacagtacctgattcggcaagg

SEQ ID NO: 886887 - DNA, 75 bp, synthetic construct
  source 1..75: mol_type = other DNA
ggttccgggacggtgataaggaggttgctgcgctcatggcctgcacgtccaggtaagggcaagcgcggggatttt

SEQ ID NO: 886888 - DNA, 75 bp, synthetic construct
  source 1..75: mol_type = other DNA
ttcccggctgatttctcacgcaaattggataccttccagaccgcgccattgcagttgatcctcgacggacgcaac

SEQ ID NO: 886889 - DNA, 75 bp, synthetic construct
  source 1..75: mol_type = other DNA
attcaggtttaatgagtccgctgcaactgactgatatcataaaaaatcgttcatctgagcataaattttttaagt

SEQ ID NO: 886890 - DNA, 75 bp, synthetic construct
  source 1..75: mol_type = other DNA
aggtctctggggtctgtttatctggtgagctcgtgtcgggtaaggataagaattgtgctttttctgatgttttaa

SEQ ID NO: 886891 - DNA, 75 bp, synthetic construct
  source 1..75: mol_type = other DNA
gtgacttaacgaagtatccgggtattcatgaattactaaaaataaccagacctcatgagaaaatttcatcaatag

SEQ ID NO: 886892 - DNA, 75 bp, synthetic construct
  source 1..75: mol_type = other DNA
cccatcaggaaagcgtgaattgattctgtcgcttgcctcatcgcttatcggttgggataagatggttaaggatga

SEQ ID NO: 886893 - DNA, 75 bp, synthetic construct
  source 1..75: mol_type = other DNA
ggtacaactctgactcttgagtgcaaaacaggtaatagcagtatacgaagtatgaattttgccgattcaggtctt

SEQ ID NO: 886894 - DNA, 75 bp, synthetic construct
  source 1..75: mol_type = other DNA
ttcctcatcgctcatcagttgggataaaatgattaaggataaatcacttagtgacttaacaatatctccaggtat

SEQ ID NO: 886895 - DNA, 75 bp, synthetic construct
  source 1..75: mol_type = other DNA
ggggtaccggctgctcccgggcctgaagacggtgcgggtgacagtgctgtttcagatggtgtcgtgtctcagcct

SEQ ID NO: 886896 - DNA, 75 bp, synthetic construct
  source 1..75: mol_type = other DNA
acagcagatgcaacgggctacagcacttcgcaggtttgccatattcaggcactttatagagaaccaacggctgat

SEQ ID NO: 886897 - DNA, 75 bp, synthetic construct
  source 1..75: mol_type = other DNA
tcgggcaaaagagatgctggagcagttcgttcaggagcgggggcataaaatcgccagctactaccgggagaacat

SEQ ID NO: 886898 - DNA, 75 bp, synthetic construct
  source 1..75: mol_type = other DNA
ccaacatcatggcaagccctttcagataaagctccttcacaatcagatccgattacccgcgcagtgataactgca

SEQ ID NO: 886899 - DNA, 75 bp, synthetic construct
  source 1..75: mol_type = other DNA
gcctgggcagcttacaagctatgcgccatcttggtcatgttgaactggtacaggcaaccagcggcacgctgatga

SEQ ID NO: 886900 - DNA, 75 bp, synthetic construct
  source 1..75: mol_type = other DNA
acaacacgccagcgtcgaactccagcagcgtagcaaaagcgcagcactcgcccggttaatgaaatacgacgtctc

SEQ ID NO: 886901 - DNA, 75 bp, synthetic construct
  source 1..75: mol_type = other DNA
gcccgcgcgattttattcaggtcaatgcgggtgtgaaccaaaaaatggtagcgcgtgcgttggaatggctggatg

SEQ ID NO: 886902 - DNA, 75 bp, synthetic construct
  source 1..75: mol_type = other DNA
tattcactcaactgaccttaattctgcaacccacaggaaagtgcctgcaatggacagagcatcacagccagcgcg

SEQ ID NO: 886903 - DNA, 75 bp, synthetic construct
  source 1..75: mol_type = other DNA
gctggccggtatccgcgaaattctcatcatcaccacgccggaagataaaggttatttccagcgcctgctgggcga

SEQ ID NO: 886904 - DNA, 75 bp, synthetic construct
  source 1..75: mol_type = other DNA
ctggaagagattgcctggcgtaacggctggctcgatgacgagggtgtgaagcgtgctgccagttcattagcgaaa

SEQ ID NO: 886905 - DNA, 75 bp, synthetic construct
  source 1..75: mol_type = other DNA
ttttattattttttgttgttttttttagattgtcgctgataatacctttcttatatttggcatttattcctgcat

SEQ ID NO: 886906 - DNA, 75 bp, synthetic construct
  source 1..75: mol_type = other DNA
ggctttatcaaaaactgaaaccactggtctgtgcgctgccgatggcccgccagcaaatcaacatcaatacattag

SEQ ID NO: 886907 - DNA, 75 bp, synthetic construct
  source 1..75: mol_type = other DNA
aagcgagatgaaccgccgtcgtctggaggcgattgtcgatgttcagcacagcctgatacagcgttttgaaagagg

SEQ ID NO: 886908 - DNA, 75 bp, synthetic construct
  source 1..75: mol_type = other DNA
gtcgcacaaattgaaaatagcctcgcagggcgtccgccaatggcggtgggggttgatatcgatgacacggtactt

SEQ ID NO: 886909 - DNA, 75 bp, synthetic construct
  source 1..75: mol_type = other DNA
tgctgggtaagatcaccttcaccgcttaaccctgggactaacgttgccaggcttgctgaacaggcaccaattcat

SEQ ID NO: 886910 - DNA, 75 bp, synthetic construct
  source 1..75: mol_type = other DNA
gtcgcacaaattgaaaatagtctcgcaggacgtccgccgatggcggttgggtttgatattgatgacaccgttctg

SEQ ID NO: 886911 - DNA, 75 bp, synthetic construct
  source 1..75: mol_type = other DNA
tgttctgtatcagtcctgcactcgccccacctggaatagcggtgttccgtggacggaatggaaagaacgtagtcg

SEQ ID NO: 886912 - DNA, 75 bp, synthetic construct
  source 1..75: mol_type = other DNA
gcaggcaactctccggtaactccggatggttggataagctgtagtgagcgaatgccgaacgacgcgcagtggtgc

SEQ ID NO: 886913 - DNA, 75 bp, synthetic construct
  source 1..75: mol_type = other DNA
ccgttgcaatactacggtttcagtctgattacgatgaaaccgctgccgttccattgttctcactcgctgagagag

SEQ ID NO: 886914 - DNA, 75 bp, synthetic construct
  source 1..75: mol_type = other DNA
aacgcttcaatttccgccgtttgcatgaggaggtcggtcgccgctggacgttcagtttcgattcttctatcggct

SEQ ID NO: 886915 - DNA, 75 bp, synthetic construct
  source 1..75: mol_type = other DNA
cgtaaaataaagcgactggaaaaccagctttcacccgcgactgatgtggcggcggcgcctcattcgtcagtggcg

SEQ ID NO: 886916 - DNA, 75 bp, synthetic construct
  source 1..75: mol_type = other DNA
ccactgaccccagagcaaaatcagaaacgcttcaatttccgccgtttgcatgaggaggtcggtcgccgctggacg

SEQ ID NO: 886917 - DNA, 75 bp, synthetic construct
  source 1..75: mol_type = other DNA
ggtcgctcgccagctgattgatatgcatgtacgccgcggtgacgcgatcttctttgtgactggtcgtagcccgac

SEQ ID NO: 886918 - DNA, 75 bp, synthetic construct
  source 1..75: mol_type = other DNA
cactggaccttagccatcctcacgtaatggggatcctcaacgtcacgcctgattccttttcggatggcggcacgc

SEQ ID NO: 886919 - DNA, 75 bp, synthetic construct
  source 1..75: mol_type = other DNA
ggtatcgcaaaagagaaattgttgctcgaccccggattcggtttcggtaaaaatctctcccataactattcatta

SEQ ID NO: 886920 - DNA, 75 bp, synthetic construct
  source 1..75: mol_type = other DNA
taccgcaccgccagcgccggtaatacaggctgatgtcgcgcaagcaattgaaaacctaaagcaaaagttagtgga

SEQ ID NO: 886921 - DNA, 75 bp, synthetic construct
  source 1..75: mol_type = other DNA
ttacagccctttctgtgccgggtaaaactgtgtcagatgattttatgcatgctgttctcagtaactgcaccacaa

SEQ ID NO: 886922 - DNA, 75 bp, synthetic construct
  source 1..75: mol_type = other DNA
ttcggacaacccggtgcaggaaaaacgaatctgatggtcgaattcatttcttctgttgtggggaataataaaaag

SEQ ID NO: 886923 - DNA, 75 bp, synthetic construct
  source 1..75: mol_type = other DNA
aattttaatatggctgctgtcggcgtgatgaaggtaagcgtacagcctgaaccgtctggtcagaatctgacaaat

SEQ ID NO: 886924 - DNA, 75 bp, synthetic construct
  source 1..75: mol_type = other DNA
cagtaactgcaccacaagaatcgtacttcctgcactgaaggaattcggttctgaatcattgccgcacaattttaa

SEQ ID NO: 886925 - DNA, 75 bp, synthetic construct
  source 1..75: mol_type = other DNA
aaacagaaacaacggagataaaaatgaacatgcgtaatattattactgcacgctctgtaccggataaaagcgtat

SEQ ID NO: 886926 - DNA, 75 bp, synthetic construct
  source 1..75: mol_type = other DNA
attcagtcctgaattattaccgcgcaattttaatatggctgctgtcggtgtgatgaagaagggtatgtcgatgag

SEQ ID NO: 886927 - DNA, 75 bp, synthetic construct
  source 1..75: mol_type = other DNA
tttatgtcaattatttcaattgcattaatatcttgaatggattacatagagttaatgtatccagtactccctatt

SEQ ID NO: 886928 - DNA, 75 bp, synthetic construct
  source 1..75: mol_type = other DNA
caggatttcatgcttcaattatcttcaaacataggatggcaaaaaggggtcgaaaacgcacttaaaaataaaatc

SEQ ID NO: 886929 - DNA, 75 bp, synthetic construct
  source 1..75: mol_type = other DNA
atgatctcatatcagggacttgttcgcaccttccctaacaccgcaaaacgttacgcggcaacaatcaggcttcgc

SEQ ID NO: 886930 - DNA, 75 bp, synthetic construct
  source 1..75: mol_type = other DNA
gctgttctcagtaactgcaccacaagaatcgcacttcctgcgccgaagaaattcagttctgaatcattgccgcac

SEQ ID NO: 886931 - DNA, 75 bp, synthetic construct
  source 1..75: mol_type = other DNA
agatcctctcccgcgtgttcaacttcgatcatgtagaagtggcggcaaacccggtccatctgttctacgtcctgg

SEQ ID NO: 886932 - DNA, 75 bp, synthetic construct
  source 1..75: mol_type = other DNA
tccaacatatgcactctttatgataagtctgcgttcatgaatctcacaagagaacatctaccccaccctctcagc

SEQ ID NO: 886933 - DNA, 75 bp, synthetic construct
  source 1..75: mol_type = other DNA
agctttatcgcggcagcgcttgcgcagtacacagccaacaaaagtgggctggacgtgcttgatgatggtgacctg

SEQ ID NO: 886934 - DNA, 75 bp, synthetic construct
  source 1..75: mol_type = other DNA
cattaagcagcgcggcagcaatggtattttcgccgcccaggctttatggcaactgctattaccgcttattatttt

SEQ ID NO: 886935 - DNA, 75 bp, synthetic construct
  source 1..75: mol_type = other DNA
tcatctggtgtgggcgacgggaggtggaatggtgccggaagaagaaatggaacaatatctggctaaggggcacta

SEQ ID NO: 886936 - DNA, 75 bp, synthetic construct
  source 1..75: mol_type = other DNA
agttactcccatgacagccatgaggctgctttcattgctgcaatgggctatcgtaccggtatgcatcgtgtattt

SEQ ID NO: 886937 - DNA, 75 bp, synthetic construct
  source 1..75: mol_type = other DNA
tgtattttctgctgcgttaatccgccgtgcactgattgttgcagcggtctgtctggctgttgcgatggggcttta

SEQ ID NO: 886938 - DNA, 75 bp, synthetic construct
  source 1..75: mol_type = other DNA
atgaaaccattcacttcccttatcgttgacgtacaaaaaacccgcctgcgtggatggcttgttgcggccgtgctg

SEQ ID NO: 886939 - DNA, 75 bp, synthetic construct
  source 1..75: mol_type = other DNA
ctcgatcgcagtctgtttccctgggcgcggcctgactcattttgcccttgggaagaggcgcgatgctgcgcggcg

SEQ ID NO: 886940 - DNA, 75 bp, synthetic construct
  source 1..75: mol_type = other DNA
tgaccaaagcgcgcgaacaggatgccgcagcagcggaaaaagccgggcgacgtacagccaatgcttctcagcgtg

SEQ ID NO: 886941 - DNA, 75 bp, synthetic construct
  source 1..75: mol_type = other DNA
actcaggcagagtttaagagggataacgcggccaaaagtggtaatggcttagtgtcaatcaatggagatgttctg

SEQ ID NO: 886942 - DNA, 75 bp, synthetic construct
  source 1..75: mol_type = other DNA
atggccgagtataaagcgcgtcttgagcaacaaatcacgcaaaaggaacaagagttaaaatctggcgaaaaggtg

SEQ ID NO: 886943 - DNA, 75 bp, synthetic construct
  source 1..75: mol_type = other DNA
gaactgctaaaacgcgcagcagtggccgtccagcagatgtccggtaagggcgtcgtttcgatggaagaactgcgt

SEQ ID NO: 886944 - DNA, 75 bp, synthetic construct
  source 1..75: mol_type = other DNA
tgtcgctggaagacaagcagtttacagcgtcaatcgaccgggcgggtaagctacttaccagattcggggagcagg

SEQ ID NO: 886945 - DNA, 75 bp, synthetic construct
  source 1..75: mol_type = other DNA
aaaatctggcagagcagatcgaaagcacctggactgatttgtttagtggcttaactgatgtcctgactgatttcg

SEQ ID NO: 886946 - DNA, 75 bp, synthetic construct
  source 1..75: mol_type = other DNA
cctggggctgtttaccgccgcccgtgtttgcgaacaggtacgcgccgctattcagtcgctgccgcgtgggcaaaa

SEQ ID NO: 886947 - DNA, 75 bp, synthetic construct
  source 1..75: mol_type = other DNA
aaatacgtgataaatggtgggggcttccgctgatcctgccttctttaatcttgcccattttcgcacaaataaata

SEQ ID NO: 886948 - DNA, 75 bp, synthetic construct
  source 1..75: mol_type = other DNA
gtggcagagtacgttgaaaacggaagagatccgcgaggcggtgctctctttggggatcgattatatgcagggtta

SEQ ID NO: 886949 - DNA, 75 bp, synthetic construct
  source 1..75: mol_type = other DNA
gggtattgattacctgcaaggctttttgattggtgaaccgcaactgttagtggatatgctggatgaaagagaacc

SEQ ID NO: 886950 - DNA, 75 bp, synthetic construct
  source 1..75: mol_type = other DNA
tttaatttcccagcgtatattctggcagattgtgtttcctgcaacgctgtttctgatacttttccagtttgctgc

SEQ ID NO: 886951 - DNA, 75 bp, synthetic construct
  source 1..75: mol_type = other DNA
cacattggctggcgccgttgctgcaaccgggcgaagatgtttatcagctctcaggtaacgatcttgcactgcggc

SEQ ID NO: 886952 - DNA, 75 bp, synthetic construct
  source 1..75: mol_type = other DNA
aagcagtttcgtttcttttgggatggaatgccgttacagcctcagattggcgtcagttattgctatgtccgctca

SEQ ID NO: 886953 - DNA, 75 bp, synthetic construct
  source 1..75: mol_type = other DNA
gaatgccgcactggcgatggggctgacgctgccgcaagcctaccgctatgttctgttacctaacgcctatcgtgt

SEQ ID NO: 886954 - DNA, 75 bp, synthetic construct
  source 1..75: mol_type = other DNA
gctggatcccaatattcagtttttcctttcatccatgctctgcctggggctgtttaccgccgcccgtgtttgcga

SEQ ID NO: 886955 - DNA, 75 bp, synthetic construct
  source 1..75: mol_type = other DNA
atgaacctggtgaaaaactccgccatcgcctcgactatcggtctggtggatatggcggcgcaggcgggtaaattg

SEQ ID NO: 886956 - DNA, 75 bp, synthetic construct
  source 1..75: mol_type = other DNA
cacgcagctgaccataacctcctccagttatctggtattctcttttattgtcaattatatggctgtactggcaac

SEQ ID NO: 886957 - DNA, 75 bp, synthetic construct
  source 1..75: mol_type = other DNA
atgaaactgaatgcaacttatataaaaatacgtgataaatggtgggggcttccgctgttcctgccttctttaatc

SEQ ID NO: 886958 - DNA, 75 bp, synthetic construct
  source 1..75: mol_type = other DNA
gttttctctccggtctgggtacgttgtatgtcgaactgttccgcaacgtgccactgattgtgcagttctttacct

SEQ ID NO: 886959 - DNA, 75 bp, synthetic construct
  source 1..75: mol_type = other DNA
ttctgcgtggactggcagcgcgccagcatgtgaagaaaagctaagacgggtatggcggccatgcgaaacatggcc

SEQ ID NO: 886960 - DNA, 75 bp, synthetic construct
  source 1..75: mol_type = other DNA
tcagagtggaacctctttttgccagacgttctgtgtcttgtaagggggacactcgaggtgtagctcatgacgttt

SEQ ID NO: 886961 - DNA, 75 bp, synthetic construct
  source 1..75: mol_type = other DNA
ttaccttgccgaccgtgccggtatcagaggccggttcagagatgcgaatgtgtaccctctggaccaggcctttcc

SEQ ID NO: 886962 - DNA, 75 bp, synthetic construct
  source 1..75: mol_type = other DNA
gtggctgaagaattccactggttaccagaggatggaatgaaaacagaaaataaaccatcgataaaaactgtaaga

SEQ ID NO: 886963 - DNA, 75 bp, synthetic construct
  source 1..75: mol_type = other DNA
tggcggaagaaccggtagagatccagaacgtcccgaaactgaaagacgtcgatacatcaatgaagctgctaagcc

SEQ ID NO: 886964 - DNA, 75 bp, synthetic construct
  source 1..75: mol_type = other DNA
ctaaatgatgtgaatgctgacctgattaacttttacaagactctgcaacgcgaggcgcattcacttatcactctg

SEQ ID NO: 886965 - DNA, 75 bp, synthetic construct
  source 1..75: mol_type = other DNA
agagtggaacctctttttgccagacgttctgtgtcttgtaagggggacactcgaggtgttgctcatgacgtctta

SEQ ID NO: 886966 - DNA, 75 bp, synthetic construct
  source 1..75: mol_type = other DNA
ttccagctccgtgtccgtaacgccattatcaaacgtcaggctcttgatttaatcatggccggttttaacggtgtg

SEQ ID NO: 886967 - DNA, 75 bp, synthetic construct
  source 1..75: mol_type = other DNA
tcgacgccggtgatgtgtcgaaaaaattcaccgttgaaccgtcggtcacccagaccctgatgaacaccatgcagg

SEQ ID NO: 886968 - DNA, 75 bp, synthetic construct
  source 1..75: mol_type = other DNA
ctacagccttgcaatacgagcttccggtgctggtggtgaatcttaataaccgctatctggggatggtgaaacagt

SEQ ID NO: 886969 - DNA, 75 bp, synthetic construct
  source 1..75: mol_type = other DNA
gccctgttcgccttaagtttacccatgcagggattgtggtggctgggcaagcgttctgtcacgccattaccccct

SEQ ID NO: 886970 - DNA, 75 bp, synthetic construct
  source 1..75: mol_type = other DNA
tccccgccatcagcataccgtcacgctgtatgccagagggctgacctgcgaagccgacaccctcggcagctgtgg

SEQ ID NO: 886971 - DNA, 75 bp, synthetic construct
  source 1..75: mol_type = other DNA
ggttgtctggtggaaaaaatcaaggtcggtgatttctccacaccggctaaggcgaccgcagagccgggagcgtaa

SEQ ID NO: 886972 - DNA, 75 bp, synthetic construct
  source 1..75: mol_type = other DNA
tgatgctggagcggacatcgaagtcggcgaagactggattagcctggatatgcatggcaaacgtccgaaggctgt

SEQ ID NO: 886973 - DNA, 75 bp, synthetic construct
  source 1..75: mol_type = other DNA
agaggcctgttcagcgatgcagatgcgtaccctctggaccaggcgtttccactgctgatgaaacaactgaaactc

SEQ ID NO: 886974 - DNA, 75 bp, synthetic construct
  source 1..75: mol_type = other DNA
agaggcctgttcagcgatgcagatgcgtaccctctggaccaggcctttccgctgctgatgaaacaactggaactc

SEQ ID NO: 886975 - DNA, 75 bp, synthetic construct
  source 1..75: mol_type = other DNA
agaggcctgttcagcgatgcagatgcgtaccctctggaccaggcttttcctctgctgatgaaacaactgcaactc

SEQ ID NO: 886976 - DNA, 75 bp, synthetic construct
  source 1..75: mol_type = other DNA
gtatgcgaaggggctgatctgtgaagccgacaccctcggctcctgtggttacgtttatctggctgtttatccgac

SEQ ID NO: 886977 - DNA, 75 bp, synthetic construct
  source 1..75: mol_type = other DNA
cgcactgctgaacgtgaaagatttgcgtgtcacctttagtaccccggatggcgacgtcacggcggtcaatgattt

SEQ ID NO: 886978 - DNA, 75 bp, synthetic construct
  source 1..75: mol_type = other DNA
tctctgcaccatgcgcacatggggaccgggacacgaatggtttcaggataatgccccgaatattaatgcgattgc

SEQ ID NO: 886979 - DNA, 75 bp, synthetic construct
  source 1..75: mol_type = other DNA
ggaaatattatgaagagttaggtgtacgccgttatggtttccacggcacgtcgcaccgctatgtttcccagcgcg

SEQ ID NO: 886980 - DNA, 75 bp, synthetic construct
  source 1..75: mol_type = other DNA
tgattgctttggatgccattcatttaggcaaagttaaggaaggtgcgaataagcggggaaattcttctcggctga

SEQ ID NO: 886981 - DNA, 75 bp, synthetic construct
  source 1..75: mol_type = other DNA
ttcgtcgtctggtcatggaacatttggctgtattaggcgtagagattgatacagaaatgaataatcgctctaact

SEQ ID NO: 886982 - DNA, 75 bp, synthetic construct
  source 1..75: mol_type = other DNA
ctcgcgcctatggtgagtcatcgcaactaggcaacctgtttaccgatgcaatgcttgtcgctgctccgactgcac

SEQ ID NO: 886983 - DNA, 75 bp, synthetic construct
  source 1..75: mol_type = other DNA
accaacgaagaaaaaatgattgctttggatgccattcatttaggcaaagttaacgcgcccgcagaatttgcataa

SEQ ID NO: 886984 - DNA, 75 bp, synthetic construct
  source 1..75: mol_type = other DNA
acagaaatgaataatcgctctaactcctgtggagagcgaattgtttccagtgaaaatgcgcgtgtcatttgcgcc

SEQ ID NO: 886985 - DNA, 75 bp, synthetic construct
  source 1..75: mol_type = other DNA
tgacgaagggggacgcttatgtgacgtccgatgtcgggcaacaccagatgttcgccgcgctttattatcctttcg

SEQ ID NO: 886986 - DNA, 75 bp, synthetic construct
  source 1..75: mol_type = other DNA
gagccagttgaaagttgacctgatgtctttctccggtcacaaaatctatggcccgaaaggtatcggtgcgctgta

SEQ ID NO: 886987 - DNA, 75 bp, synthetic construct
  source 1..75: mol_type = other DNA
catgggtggcctgcaggccgtgcgtgcgccgttcttcccgccgaatgcactgctgatccccatcacccgtctgga

SEQ ID NO: 886988 - DNA, 75 bp, synthetic construct
  source 1..75: mol_type = other DNA
gcaagcattagcacccgtagaaggcaagcctgactatcaggcattagctgacacgcttaagcgcgccttcaaaca

SEQ ID NO: 886989 - DNA, 75 bp, synthetic construct
  source 1..75: mol_type = other DNA
cacggcgctggattcgaacaaatacacctgtaataaggtgaacgcggatactttcgcctcttatgcgcagcttga

SEQ ID NO: 886990 - DNA, 75 bp, synthetic construct
  source 1..75: mol_type = other DNA
ttgatgcgtatcttgagcgacaggccgaactcaatcacatcaacaaatcccacgtaacaaaggcgttcagcattg

SEQ ID NO: 886991 - DNA, 75 bp, synthetic construct
  source 1..75: mol_type = other DNA
atcgaagcgcaaatgcacggcggcggtcacgagcgcggtatgcgttccggcactctgcctgttcaccagatcgtc

SEQ ID NO: 886992 - DNA, 75 bp, synthetic construct
  source 1..75: mol_type = other DNA
agataaactggcggaaggtatccgtaagtttgctattgaccaggaaaaactggaaaaaatgattggcgatctgct

SEQ ID NO: 886993 - DNA, 75 bp, synthetic construct
  source 1..75: mol_type = other DNA
aatgcgactaaagcgcttcgcccggatgttgctaaacccgtctggcacaattcgcttcgcttgccgaaaaacgaa

SEQ ID NO: 886994 - DNA, 75 bp, synthetic construct
  source 1..75: mol_type = other DNA
ctaaaattattaaatatgcattagataattactgtgttaactattactcaagttcaaatagtggtagttatctat

SEQ ID NO: 886995 - DNA, 75 bp, synthetic construct
  source 1..75: mol_type = other DNA
cgcaatgaagccccggcgcgcgtgatgagcaaggtcactgacgaggaaggccgcaccacctctgaggttatccgc

SEQ ID NO: 886996 - DNA, 75 bp, synthetic construct
  source 1..75: mol_type = other DNA
tgacctgtgggcgcgttatcaggatttccagctccgtatccgtaacgccattatcaaacgccagtcccttgattt

SEQ ID NO: 886997 - DNA, 75 bp, synthetic construct
  source 1..75: mol_type = other DNA
aaccgtcggtcacccagaccctgatgaacaccatgcaggagtcctctgattttctgacccgtatcaacattgtgc

SEQ ID NO: 886998 - DNA, 75 bp, synthetic construct
  source 1..75: mol_type = other DNA
aaaacccgctgctacaggatgtgaacaaaggctggctgcagaaaatccgtgaagatgcaccggatcacgtcatgg

SEQ ID NO: 886999 - DNA, 75 bp, synthetic construct
  source 1..75: mol_type = other DNA
gccgcgatgcttgcagctgacggaccgcgttacaaagcgatcggcaatagtatggcgataccagtaatgcgctgg

SEQ ID NO: 887000 - DNA, 75 bp, synthetic construct
  source 1..75: mol_type = other DNA
tcggttatgggaagtataaaactccgtatttcccattacaggagatggaagccttcctcggtgcggaagggcgtt

SEQ ID NO: 887001 - DNA, 75 bp, synthetic construct
  source 1..75: mol_type = other DNA
ggtgcttaccggatggtagcatttggtgagtatgcggatgatgaggcggcttccacggtcaaggccagagatttt

SEQ ID NO: 887002 - DNA, 75 bp, synthetic construct
  source 1..75: mol_type = other DNA
aaacggaagatataccgcaggtgctgaaaaaggcattctggctggcggcaagcggtcgtcctgggcctgtggtgg

SEQ ID NO: 887003 - DNA, 75 bp, synthetic construct
  source 1..75: mol_type = other DNA
tacgtggtggaagactacgccgccggttgtctggtggaaaaaatcaaggtcggtgacttctccacaccggctaag

SEQ ID NO: 887004 - DNA, 75 bp, synthetic construct
  source 1..75: mol_type = other DNA
attgattacgtggtggaagactacgccgccggttgtctggtggaaaaaattaaggtcggtgatttctccacaccg

SEQ ID NO: 887005 - DNA, 75 bp, synthetic construct
  source 1..75: mol_type = other DNA
tgagcttatcgatgtggtctaccaggacgatgacgatctggtggtgatttgcggtcgtgaactgctgtctgacaa

SEQ ID NO: 887006 - DNA, 75 bp, synthetic construct
  source 1..75: mol_type = other DNA
cgtgcgaaaacctccaaccgtagcgataacccgctgctgcaggatgtgaacaaaggctggctgcagaaaatccgt

SEQ ID NO: 887007 - DNA, 75 bp, synthetic construct
  source 1..75: mol_type = other DNA
catgggtggcctgcaggccttgcgtgcgccgttcttcccgccgaatgcgctgctgatcacccgtctggataacct

SEQ ID NO: 887008 - DNA, 75 bp, synthetic construct
  source 1..75: mol_type = other DNA
gttggtggcggttccgtatttacgaatgcaggatttcgccacaacctgcttaatgatattaacggtgacctgatt

SEQ ID NO: 887009 - DNA, 75 bp, synthetic construct
  source 1..75: mol_type = other DNA
cattcagtatcgcgggattacgtggtgggcttgatgatgagcgtggcgcgctaactttaaagtatgtggagcttg

SEQ ID NO: 887010 - DNA, 75 bp, synthetic construct
  source 1..75: mol_type = other DNA
tgaagcagcgagcattgcctgggaaccgttgggtatgcgtccggcgtggtttgctgaaatcgagccttttccatc

SEQ ID NO: 887011 - DNA, 75 bp, synthetic construct
  source 1..75: mol_type = other DNA
gtgtcagacacactccccgggacaacgcctcccgacgacaatcacgaccgcctctggtggggactgccctgcacc

SEQ ID NO: 887012 - DNA, 75 bp, synthetic construct
  source 1..75: mol_type = other DNA
agaggccggttcagcgacgcagatgcataccatctggaccaggcctttccgctgctgatgaaacaactggaactc

SEQ ID NO: 887013 - DNA, 75 bp, synthetic construct
  source 1..75: mol_type = other DNA
gaacctgctggtatgagctgacagggctgtggcacctgttatccgcacagggccacaacgtttaccgtgtacctc

SEQ ID NO: 887014 - DNA, 75 bp, synthetic construct
  source 1..75: mol_type = other DNA
ctgcaccgtgatgccctgtttcggcgcccgtctggtgcaggaaggcaatcagttgcattaccttgccgaccgtgc

SEQ ID NO: 887015 - DNA, 75 bp, synthetic construct
  source 1..75: mol_type = other DNA
cgaaggggctgacctgtgaagccgacaccctcggctcctgtggttacgtttatctggctgtttatccgacacctg

SEQ ID NO: 887016 - DNA, 75 bp, synthetic construct
  source 1..75: mol_type = other DNA
atgctcaccagcggtgaactgaatccccgatatcagcataccgtcacgctgtatgcaaaagggctgacctgcgaa

SEQ ID NO: 887017 - DNA, 75 bp, synthetic construct
  source 1..75: mol_type = other DNA
gccctgtttcggggcacgtctggtgcaggagggtaaccggttgcattaccttgccgaccgcgccggtatcagagg

SEQ ID NO: 887018 - DNA, 75 bp, synthetic construct
  source 1..75: mol_type = other DNA
atgcatacaccttcaccgaagccggtctgtgcaccggctgacccgtcatcgttaaactatcattcaccgattttc

SEQ ID NO: 887019 - DNA, 75 bp, synthetic construct
  source 1..75: mol_type = other DNA
cgcatcccgatgacaatcacgaccgcccctggtgggggctgccctgtaccgtgacaccttgttttggcgcccgtc

SEQ ID NO: 887020 - DNA, 75 bp, synthetic construct
  source 1..75: mol_type = other DNA
gtgtcagacaagctccatgagacaacgtatcccgatgacaataacaaccgcccctggtgggggctgccctgcacc

SEQ ID NO: 887021 - DNA, 75 bp, synthetic construct
  source 1..75: mol_type = other DNA
ctggtgcaggagggtaaccggttgcattaccttgccgaccgtgccggtatcagaggccggttcagagatgcggat

SEQ ID NO: 887022 - DNA, 75 bp, synthetic construct
  source 1..75: mol_type = other DNA
ctgacctgcaaagccgataccctcagcagttgtggttacgtttatctggctgtttatccgacgcccgaaatgaaa

SEQ ID NO: 887023 - DNA, 75 bp, synthetic construct
  source 1..75: mol_type = other DNA
actcatgctcaccagcggtgaactgaatccccgccatcagcataccgtaaccctgtatgcgaagggactgacctg

SEQ ID NO: 887024 - DNA, 75 bp, synthetic construct
  source 1..75: mol_type = other DNA
aaagggctgacctgcgaagccgacaccctcggctcctgtggttacgtttatctggctgtttatccgacgcccgaa

SEQ ID NO: 887025 - DNA, 75 bp, synthetic construct
  source 1..75: mol_type = other DNA
gcgacgcgaggccgtgcttcggtgcaaggcttgtgcagaaaggctgtcgcctgcattttctggcggaccgtgcag

SEQ ID NO: 887026 - DNA, 75 bp, synthetic construct
  source 1..75: mol_type = other DNA
gtatcagaggccggttcagagatgcggatgcgtaccctctggaccaggcctttccgctgctgatgaaacaactga

SEQ ID NO: 887027 - DNA, 75 bp, synthetic construct
  source 1..75: mol_type = other DNA
cacgctgtatgcaaaaggtctgacctgcaaagctgacactctcggtagcggtggttacgtttatctggctgttta

SEQ ID NO: 887028 - DNA, 75 bp, synthetic construct
  source 1..75: mol_type = other DNA
gccgatacccttggcagttgtggttacgtttatctggctgtttatccgacaccggcagcgcccacaatcaccgta

SEQ ID NO: 887029 - DNA, 75 bp, synthetic construct
  source 1..75: mol_type = other DNA
gtatgtgaaggggctgacctgtgaagccgacaccctcggctcctgtggttacgtttatctggctgtttatccgac

SEQ ID NO: 887030 - DNA, 75 bp, synthetic construct
  source 1..75: mol_type = other DNA
actcatgctcaccagcggtgaactgaatccccgccatcagcataccgtcactctgtatgcgaatggactgacctg

SEQ ID NO: 887031 - DNA, 75 bp, synthetic construct
  source 1..75: mol_type = other DNA
actcatgctcaccagcggtgaactgaatccccgccatcagcataccgtcacactgtatgcgaagggactgacctg

SEQ ID NO: 887032 - DNA, 75 bp, synthetic construct
  source 1..75: mol_type = other DNA
actcatgctcaccagcggtgaactgaatccccgccatcagcataccgtaacgctgtatgcgaacggactgacctg

SEQ ID NO: 887033 - DNA, 75 bp, synthetic construct
  source 1..75: mol_type = other DNA
actcatgctcaccagcggtgaactgaatccccgccatcagcataccgtgaccctgtatgcgaaaggactgacctg

SEQ ID NO: 887034 - DNA, 75 bp, synthetic construct
  source 1..75: mol_type = other DNA
actcatgctcaccagcggtgaactgaatccccgccatcagcataccgtgacactgtatgcgaacggactgacctg

SEQ ID NO: 887035 - DNA, 75 bp, synthetic construct
  source 1..75: mol_type = other DNA
actcatgctcaccagcggtgaactgaatccccgccatcagcataccgtcacgctgtatgcgaaaggactgacctg

SEQ ID NO: 887036 - DNA, 75 bp, synthetic construct
  source 1..75: mol_type = other DNA
gtgtcagacacactccatgaaacaaattatcccgacgacaacaacgaccgctcctggtgggggctaccctgcacc

SEQ ID NO: 887037 - DNA, 75 bp, synthetic construct
  source 1..75: mol_type = other DNA
gagcgtaaagcgcaggggaatttcaggcgagaagaggtgagatgcgccagcggtgttgcttgctggggcgtgatg

SEQ ID NO: 887038 - DNA, 75 bp, synthetic construct
  source 1..75: mol_type = other DNA
cagatggaacagttgttccccttacatatggcgcgtttttgtctgatgcttgccgatcattactattcctcaagc

SEQ ID NO: 887039 - DNA, 75 bp, synthetic construct
  source 1..75: mol_type = other DNA
gaagtgagagtacccgtctgtgacgaagatgcgctcaacggctggcattatcacccatggttaggggtgtttcgc

SEQ ID NO: 887040 - DNA, 75 bp, synthetic construct
  source 1..75: mol_type = other DNA
aggggccggttcagcaatgcggatgcataccatctggaccaggcttttccactgctgatgaaacaactggaactc

SEQ ID NO: 887041 - DNA, 75 bp, synthetic construct
  source 1..75: mol_type = other DNA
aagatcagggcgcaaccaaccttaccgacgcgctcaaaaacgtccccggcgtgggtaatgccagtcagttaagca

SEQ ID NO: 887042 - DNA, 75 bp, synthetic construct
  source 1..75: mol_type = other DNA
gcacaaaaaatgcccgcgtggagagttgccgtattattgatcagtttgccgaacgcacaggtgatgccgcatggc

SEQ ID NO: 887043 - DNA, 75 bp, synthetic construct
  source 1..75: mol_type = other DNA
aagatcagggcgcaaccaaccttaccgacgcgctcaaaaacgtccccggcgtgggtaatgccgatcagttaagga

SEQ ID NO: 887044 - DNA, 75 bp, synthetic construct
  source 1..75: mol_type = other DNA
tatctattggaaggaaaaacggatcagcaacgcatcgaaaactatgcggaaactctggcgacgctggtgcaaagc

SEQ ID NO: 887045 - DNA, 75 bp, synthetic construct
  source 1..75: mol_type = other DNA
attatcccgacgaccataacgaccgcccctggtggggactgccctgcaccgtgataccctgttttggcgcccgtc

SEQ ID NO: 887046 - DNA, 75 bp, synthetic construct
  source 1..75: mol_type = other DNA
gcgattcaggatgttatcgaaagcgtggctcagacggtacatgagcaaatgctgaagttgcatcaggcgcatcgc

SEQ ID NO: 887047 - DNA, 75 bp, synthetic construct
  source 1..75: mol_type = other DNA
gctgctgatgaaacaactggaattaatgctcaccagcggtgaactgaccccccgccatcagcataccgtcacgct

SEQ ID NO: 887048 - DNA, 75 bp, synthetic construct
  source 1..75: mol_type = other DNA
cgcttcccgacgacaacaaagaccgcccctggtgggggctgccctgcaccgtgacgccctgtttcggggcacgtc

SEQ ID NO: 887049 - DNA, 75 bp, synthetic construct
  source 1..75: mol_type = other DNA
cccgccatcagcataccgtcacgctgtatgcaaaagggctgacctgtaaagccaataccctcggcagttgtggtt

SEQ ID NO: 887050 - DNA, 75 bp, synthetic construct
  source 1..75: mol_type = other DNA
actgctgatgaaacaactggaactcatgctcaccagcggtgaactgaatccccggcatcagcataccgtcacgct

SEQ ID NO: 887051 - DNA, 75 bp, synthetic construct
  source 1..75: mol_type = other DNA
atcagcagcgctgcattttaatgacaaaaatatgtactaccgcatgacctggtggggagtaaatgaagactccgt

SEQ ID NO: 887052 - DNA, 75 bp, synthetic construct
  source 1..75: mol_type = other DNA
ggtggatgtcagggcgttcaccgggaaagcgaaatactgtaaaaaatttgcagcaggcttcagtaactgctgcaa

SEQ ID NO: 887053 - DNA, 75 bp, synthetic construct
  source 1..75: mol_type = other DNA
tacgtactggaatatctactcggtatgtactgtgcctccgatgacgatgaggttgtcgagcaggggctacagtcg

SEQ ID NO: 887054 - DNA, 75 bp, synthetic construct
  source 1..75: mol_type = other DNA
cgcgagcgtggttcgtacaaaatcatcgataaagtgtcggtgaagctaaaccagaaaaaagacgtttacgaagcc

SEQ ID NO: 887055 - DNA, 75 bp, synthetic construct
  source 1..75: mol_type = other DNA
tgccgtcgcagatggtgaaagacaacgagaaactgctgactggtggcatctggtgcatgatcaccgtgaactact

SEQ ID NO: 887056 - DNA, 75 bp, synthetic construct
  source 1..75: mol_type = other DNA
gtgtcagacacattctccgggacaacgcatcccgatgacaatcacgaccgtccctggtggggactacccagcacc

SEQ ID NO: 887057 - DNA, 75 bp, synthetic construct
  source 1..75: mol_type = other DNA
cccgccatcagcataccgtcacgctgtatgctaaagggctgacctgcgatgccgacaccctcggctcctgtggtt

SEQ ID NO: 887058 - DNA, 75 bp, synthetic construct
  source 1..75: mol_type = other DNA
cgcatcccgacaacaacaacgaccgcccctggtgggggctaccctgcaccgtgacgccctgtttcggtgcacgtc

SEQ ID NO: 887059 - DNA, 75 bp, synthetic construct
  source 1..75: mol_type = other DNA
ggcatgtttaaaatcatcgacaaagtaagcgttaagctcaatcagaaaaaagacgtctatgaagctgcgttgtcg

SEQ ID NO: 887060 - DNA, 75 bp, synthetic construct
  source 1..75: mol_type = other DNA
tatgtgctggagtatttgctcgggatgtattgtgcgtcggatgatgctgcagtaattgagcagggcttacagtcc

SEQ ID NO: 887061 - DNA, 75 bp, synthetic construct
  source 1..75: mol_type = other DNA
gccgacaccctcggcagctgtggttacgtttatctggctgtttatccgacacccgaaacgaaaagtaaatcatca

SEQ ID NO: 887062 - DNA, 75 bp, synthetic construct
  source 1..75: mol_type = other DNA
aacaaatattgtggttcttgaatgtactaccctcgccgatcttctgacaaatgataacattggttttttatataa

SEQ ID NO: 887063 - DNA, 75 bp, synthetic construct
  source 1..75: mol_type = other DNA
ttttttagtgattttgaaaagataaactccatttcattacctgtcttagtgtttgatctcaaagagggtgttcct

SEQ ID NO: 887064 - DNA, 75 bp, synthetic construct
  source 1..75: mol_type = other DNA
ttgtttttaaacactatcctttaatgaaaacaatatccgcccagcaggcgataagtactctcaaatatatggttg

SEQ ID NO: 887065 - DNA, 75 bp, synthetic construct
  source 1..75: mol_type = other DNA
tttcacgcgacaaacgtgggcaatggatgggattttgcattgcaatggtagtgcttataatggctgcgttttttg

SEQ ID NO: 887066 - DNA, 75 bp, synthetic construct
  source 1..75: mol_type = other DNA
gccgacagcgtctcaccggaagtccgggggaaactgcccggcagtatctccgggcatggctatattgatttcgtc

SEQ ID NO: 887067 - DNA, 75 bp, synthetic construct
  source 1..75: mol_type = other DNA
ccatcgtaaatccgcgtttaatgtcgcgtatttctttgttgaaaaacgcagtccgctgacacacgggaaaatcac

SEQ ID NO: 887068 - DNA, 75 bp, synthetic construct
  source 1..75: mol_type = other DNA
gctttgagtacctgttttgttcactgtatcgcaaagcatttgtcaaaaccctgcgtcttaatgaatgcagcgaac

SEQ ID NO: 887069 - DNA, 75 bp, synthetic construct
  source 1..75: mol_type = other DNA
atgtccttgattaacaccaaaattaaaccttttaaaaaccaggcattcaaaaacggcgaattcattgaaatcacc

SEQ ID NO: 887070 - DNA, 75 bp, synthetic construct
  source 1..75: mol_type = other DNA
aatcaggagctttttcggaatttttagatgctatagaacatggttatatattgccagggactacattgttagttg

SEQ ID NO: 887071 - DNA, 75 bp, synthetic construct
  source 1..75: mol_type = other DNA
ggtgacaaccttacaccagaagtacaggcaaagcttcctggcacattgacgggcaatggctacattgattttgtc

SEQ ID NO: 887072 - DNA, 75 bp, synthetic construct
  source 1..75: mol_type = other DNA
caatggctgccggcatgcttactgatacatcaataagcagcttattgttagccactttaatgtcaggaagcttaa

SEQ ID NO: 887073 - DNA, 75 bp, synthetic construct
  source 1..75: mol_type = other DNA
gttgtgttgagtggagtgaatcatcgtgcgtggctgctggtaattttttgcgattgttaagcgaagctggctggg

SEQ ID NO: 887074 - DNA, 75 bp, synthetic construct
  source 1..75: mol_type = other DNA
ataagggcgtttgcgcactggagcacgatggatttgtttcatatgaggagataactgactggtctcatccatatc

SEQ ID NO: 887075 - DNA, 75 bp, synthetic construct
  source 1..75: mol_type = other DNA
taccattatctgactgacattttcaccaagcgtaaaagctactcatttgatgatctgattggagttgcgatcgac

SEQ ID NO: 887076 - DNA, 75 bp, synthetic construct
  source 1..75: mol_type = other DNA
tataaaaaatctgatttaaaattagttacagagtttgttagtgagtcagaagcaagagaacataaatgggatgat

SEQ ID NO: 887077 - DNA, 75 bp, synthetic construct
  source 1..75: mol_type = other DNA
cagcagataacgaggcattaacgccacaagaaatgctggatttgtcggtgagggctggtgactttctgaaacaag

SEQ ID NO: 887078 - DNA, 75 bp, synthetic construct
  source 1..75: mol_type = other DNA
ggggtatcgattgtaagccgtggcgatgatctggtcggtttgccaaaagtaccaccccacatgggccgttggagt

SEQ ID NO: 887079 - DNA, 75 bp, synthetic construct
  source 1..75: mol_type = other DNA
aatcaggagctttttcggaatttttagatgctatagagcatggttatatattgccaggaactacattgttagttg

SEQ ID NO: 887080 - DNA, 75 bp, synthetic construct
  source 1..75: mol_type = other DNA
cattaaaatcagtggtttcactgaggaagaactattaggccagcctcacaacatcgtaagacacccagatatgcc

SEQ ID NO: 887081 - DNA, 75 bp, synthetic construct
  source 1..75: mol_type = other DNA
cattaagtcaatccctctacactgggcgcaccgatgagtttggccaaatagagtttgctttacgaatgatgcaag

SEQ ID NO: 887082 - DNA, 75 bp, synthetic construct
  source 1..75: mol_type = other DNA
gatggcatacatcagtcaggtgaaaaaaatggtattacccgccattaaaactgaagctgaatttaacgccattaa

SEQ ID NO: 887083 - DNA, 75 bp, synthetic construct
  source 1..75: mol_type = other DNA
ttacctgaaggtactgatatttcaggaaactggaagtttgataatggtgtcatctcacaactcccggttaactat

SEQ ID NO: 887084 - DNA, 75 bp, synthetic construct
  source 1..75: mol_type = other DNA
aagacagagcagcacttacccaatggatggcatacatcagtcaggtgaagaaaatggaactccccgccattaaaa

SEQ ID NO: 887085 - DNA, 75 bp, synthetic construct
  source 1..75: mol_type = other DNA
aatgtggtctatttctttgtggaaaaacgcagaccgctggcactgggaaaaatcaccaaaaacatccgtatcact

SEQ ID NO: 887086 - DNA, 75 bp, synthetic construct
  source 1..75: mol_type = other DNA
catttttaccatttattattgtgttaagtaatatatttggtgttcaaacaatgttgactcataattataagagac

SEQ ID NO: 887087 - DNA, 75 bp, synthetic construct
  source 1..75: mol_type = other DNA
tggcaaacaagctggcacgaacagtgtgggcaatagctgctcacggacgtaaatacgacaagaatcacgtcagta

SEQ ID NO: 887088 - DNA, 75 bp, synthetic construct
  source 1..75: mol_type = other DNA
attttctgacgttctttagtaaccgcgaaccttgcctgattggcatgaaagcctgtggaggctctcagcactggg

SEQ ID NO: 887089 - DNA, 75 bp, synthetic construct
  source 1..75: mol_type = other DNA
agaaaagtatttatattcagttgatatattgaggtggatggccttcttaccatttgtacttgttttaagtaatat

SEQ ID NO: 887090 - DNA, 75 bp, synthetic construct
  source 1..75: mol_type = other DNA
aaaatatcttctatttagctatattgcaaggaagttattttatactgccattgttaacatttccttatcttgtta

SEQ ID NO: 887091 - DNA, 75 bp, synthetic construct
  source 1..75: mol_type = other DNA
aggcaataaaaataataaaaaaatcgctacgctatgttggaggtttagcttttttgggatcagtattcttatatc

SEQ ID NO: 887092 - DNA, 75 bp, synthetic construct
  source 1..75: mol_type = other DNA
tccgatgcagtctgcgccacaaggtgcaacagcacaaaccgccagtacggcgacgacaccagatcgcacgctgcc

SEQ ID NO: 887093 - DNA, 75 bp, synthetic construct
  source 1..75: mol_type = other DNA
gatcttaccgaaaacggtaaaaccgaagcggtgaagcggcagaatggcagcaattacactgtcgtctttacgatt

SEQ ID NO: 887094 - DNA, 75 bp, synthetic construct
  source 1..75: mol_type = other DNA
gctggaatttggtgaaacgacgcacaaggggcgtgctgctttggcgaaggaggtgccggaagccctggagcgtct

SEQ ID NO: 887095 - DNA, 75 bp, synthetic construct
  source 1..75: mol_type = other DNA
gcggaggagtggtatcgcgggcgcgatgtatacccgcatgccgcgccagtggcggatgatgtattggttactttc

SEQ ID NO: 887096 - DNA, 75 bp, synthetic construct
  source 1..75: mol_type = other DNA
atgatgtatcgcatcagaaattggttggtagcgacgctgctgctgctgctgtgcacgccggtgggtgccgcgacg

SEQ ID NO: 887097 - DNA, 75 bp, synthetic construct
  source 1..75: mol_type = other DNA
tctctaaccgtcgtgcaaacagcgagatggcaagctggctggaacagcatgagaaacagtcggagctactgggcg

SEQ ID NO: 887098 - DNA, 75 bp, synthetic construct
  source 1..75: mol_type = other DNA
cgagcaatgttaattccattaacgttcatttttgtaaaatctccagaagatgtttggatagccgcgttaattcag

SEQ ID NO: 887099 - DNA, 75 bp, synthetic construct
  source 1..75: mol_type = other DNA
gctggcgcagcgctctttcatcattacattcagaaagataatactctgttacgaatgatgcctcgccacaaataa

SEQ ID NO: 887100 - DNA, 75 bp, synthetic construct
  source 1..75: mol_type = other DNA
taaaaaatattcacgaaacctgggcaaatataggctactttttaatcgcagctcacgctggcgcagcactctttc

SEQ ID NO: 887101 - DNA, 75 bp, synthetic construct
  source 1..75: mol_type = other DNA
tgtaccgccgtctgcgtgccgccaccgaatccctgaacagcgacagcgacgtggatatgcgcctcatcaaggaca

SEQ ID NO: 887102 - DNA, 75 bp, synthetic construct
  source 1..75: mol_type = other DNA
gcgagcgggaattactgcctctggtacgttgctatttgctgggttggtttgcagataacgtctcaccggaagtaa

SEQ ID NO: 887103 - DNA, 75 bp, synthetic construct
  source 1..75: mol_type = other DNA
cctggagcctacacagcgccattgaagaagtcatggcagaagtggatattttgtacatgactcgcgtgcaaaaag

SEQ ID NO: 887104 - DNA, 75 bp, synthetic construct
  source 1..75: mol_type = other DNA
tttatttacattggataacgctgctttttgttgcaataacctatgccgcgatggaactccgtggctggtttccta

SEQ ID NO: 887105 - DNA, 75 bp, synthetic construct
  source 1..75: mol_type = other DNA
acccttcgcgttaattgcaggtggttgcgtcggtttttacgatggattctttggtccggctgccggatcgtttta

SEQ ID NO: 887106 - DNA, 75 bp, synthetic construct
  source 1..75: mol_type = other DNA
atgactgttgttactgtcggtattgatttagctaaaaatgtgttcgctgtgcatggcgttaatgctgcaggaaaa

SEQ ID NO: 887107 - DNA, 75 bp, synthetic construct
  source 1..75: mol_type = other DNA
ctgggcgacgttgctgaccactacgaagaactgcagaaactgggcgtagacgtatacgcagtatctaccgatact

SEQ ID NO: 887108 - DNA, 75 bp, synthetic construct
  source 1..75: mol_type = other DNA
agaactgcgcgggcaggatggcatcagcgaagaactggagcagcgtatccgtgatgtgctgctggggaaagcgta

SEQ ID NO: 887109 - DNA, 75 bp, synthetic construct
  source 1..75: mol_type = other DNA
atgctgcgtgacaaggcaatcccacaggcccgcattctggaagaaattaacgccctgattgaagatgccggactg

SEQ ID NO: 887110 - DNA, 75 bp, synthetic construct
  source 1..75: mol_type = other DNA
ctgcgtgatttacgcgagcagacaaaagccatgatggccgaactgggggacaagccgaccggtgaaaccactgca

SEQ ID NO: 887111 - DNA, 75 bp, synthetic construct
  source 1..75: mol_type = other DNA
tcgtgataaagacggtgagaaacgttatgcgtttgggaaagattgccggagtacatttgacctacaacgggataa

SEQ ID NO: 887112 - DNA, 75 bp, synthetic construct
  source 1..75: mol_type = other DNA
ctggtgactgtggaaggggtttactactggagtaataatgaattttttccgcataaaacatataaaagaatattc

SEQ ID NO: 887113 - DNA, 75 bp, synthetic construct
  source 1..75: mol_type = other DNA
ttaacccctgctttgctgcaatggctaaggtcggcagtgacagggaattagttgaatacttcgcaactgtgcacg

SEQ ID NO: 887114 - DNA, 75 bp, synthetic construct
  source 1..75: mol_type = other DNA
caatgcggcgcatcttgataaaaacggcagtcttcttaccgttgaaggcaggtacaccagttacaacaatgaatt

SEQ ID NO: 887115 - DNA, 75 bp, synthetic construct
  source 1..75: mol_type = other DNA
ggaccctgggatacaatctggcggactaaatcacaggtctttgtgaatggagatgccatcaacgccgatccggat

SEQ ID NO: 887116 - DNA, 75 bp, synthetic construct
  source 1..75: mol_type = other DNA
attggtgacggaccagatgaagacacggtcacaaaccaggagggtgagtacaagccaacattcgacatccttgag

SEQ ID NO: 887117 - DNA, 75 bp, synthetic construct
  source 1..75: mol_type = other DNA
attattttgaaaattaaagagatatggttatggagtgatttagtaacattgattgtttcaattctgggcggtatg

SEQ ID NO: 887118 - DNA, 75 bp, synthetic construct
  source 1..75: mol_type = other DNA
ttagttaattatttttcgcgcaatagtgacaatatgataataggtcattatttttcaacctctatattaggggca

SEQ ID NO: 887119 - DNA, 75 bp, synthetic construct
  source 1..75: mol_type = other DNA
tattttatgacgattacagttggactgttttgccaggagacgatcccacgaaaaccgctacagaccgcactcgtt

SEQ ID NO: 887120 - DNA, 75 bp, synthetic construct
  source 1..75: mol_type = other DNA
atcggtgacgggccggaagaaaatacaagcgagatccaggaaggtgaatacaagccgacatttgatgtacttgat

SEQ ID NO: 887121 - DNA, 75 bp, synthetic construct
  source 1..75: mol_type = other DNA
atgatctggataatgctcgccacgctggcggtagtgtttgtggttggttttcgggtgctgacatccggggccaga

SEQ ID NO: 887122 - DNA, 75 bp, synthetic construct
  source 1..75: mol_type = other DNA
tcagagtctggatgagattccggcgcgatgtgacagcgacttcacgtctgaaagtgctgaccggtgcatttaaag

SEQ ID NO: 887123 - DNA, 75 bp, synthetic construct
  source 1..75: mol_type = other DNA
ggcacagaaagctgaccttttcctggcctgtcagtatctcagtaatgacgatgccgacacccacaccatggtggc

SEQ ID NO: 887124 - DNA, 75 bp, synthetic construct
  source 1..75: mol_type = other DNA
gacagttccggcacttcaggaacagctaaccacattttcacagtcaatgcgcataaaaattgactggcgggaggt

SEQ ID NO: 887125 - DNA, 75 bp, synthetic construct
  source 1..75: mol_type = other DNA
ttgaacgggtcaatgcagaaaaaaattcgtccggtttcactgatatcgggtaaacaggcattccttgcgggcctt

SEQ ID NO: 887126 - DNA, 75 bp, synthetic construct
  source 1..75: mol_type = other DNA
ttattcgctggctgaatgttcaactgacggcggcagcggcaatcttcgcgcctcgtacactaatacagctggcgc

SEQ ID NO: 887127 - DNA, 75 bp, synthetic construct
  source 1..75: mol_type = other DNA
ccctgcacaccatctggctgaacgcctgaaagagccttctgtccgttttatctctgtcacacggcaactggagaa

SEQ ID NO: 887128 - DNA, 75 bp, synthetic construct
  source 1..75: mol_type = other DNA
gctggcagtattatgaacgatggcagactgaaaaagccgcgcaggcagctgctgcccgacaggtcacagaggaac

SEQ ID NO: 887129 - DNA, 75 bp, synthetic construct
  source 1..75: mol_type = other DNA
ggtatcgggaaaaatatgggggcactgggcgctctgtctgtggatatgacgcaggctaattccacacttcccgat

SEQ ID NO: 887130 - DNA, 75 bp, synthetic construct
  source 1..75: mol_type = other DNA
tgacttgcaggtaacgattaaagaggctgacggcagtacgcagatttttaccgtaccctattcgtcagtcccgct

SEQ ID NO: 887131 - DNA, 75 bp, synthetic construct
  source 1..75: mol_type = other DNA
gaagatttttacaactaatgacagaaaacgttaaatcagagttacttcttcagatggcggacaataacgaagtaa

SEQ ID NO: 887132 - DNA, 75 bp, synthetic construct
  source 1..75: mol_type = other DNA
cattctggtgtcgcctgccgtggtacagggggctccggatatcacccgggaaatccagcaggatatcgcccggcg

SEQ ID NO: 887133 - DNA, 75 bp, synthetic construct
  source 1..75: mol_type = other DNA
ctgaactacagcctgtcccggaatgcatggcaacatgaaactgaccggatactgtcatttgatgtcagcattccg

SEQ ID NO: 887134 - DNA, 75 bp, synthetic construct
  source 1..75: mol_type = other DNA
gcagcacattaacacctggctggagcgggatatagttcccctgcgctcccgtctgacgatgggggacagttatac

SEQ ID NO: 887135 - DNA, 75 bp, synthetic construct
  source 1..75: mol_type = other DNA
aggttcgtttcccgaatttatttgtctccattctgatcgctcgtcacttcgagaaaccgattctgagagactcat

SEQ ID NO: 887136 - DNA, 75 bp, synthetic construct
  source 1..75: mol_type = other DNA
cagaaattaaacattatgttattcagtttaaccgtttagatgggatcagctggctgacacgttttggagaggtga

SEQ ID NO: 887137 - DNA, 75 bp, synthetic construct
  source 1..75: mol_type = other DNA
atgaatgaatatccggttgttttagttattaactgtggttcgtcttcaattaagttttctgtgctggatacctca

SEQ ID NO: 887138 - DNA, 75 bp, synthetic construct
  source 1..75: mol_type = other DNA
atgaagacaattattctgccggttgctctggccctgatgggtataaatgcggacgcttatgcggccgatgtaaag

SEQ ID NO: 887139 - DNA, 75 bp, synthetic construct
  source 1..75: mol_type = other DNA
cggtatctactcactcaaaaacgaaatgctgttatccacagaatcaggggataacaccggaaaaaacatgtgagc

SEQ ID NO: 887140 - DNA, 75 bp, synthetic construct
  source 1..75: mol_type = other DNA
aaaagccgaagccagggacaaaggccgcgccgatggcgtttttccataggctccgcccccctgacgagcatcaca

SEQ ID NO: 887141 - DNA, 75 bp, synthetic construct
  source 1..75: mol_type = other DNA
attgctgcacagtttaacctgagcactcgtactgtcatgaatctcaaaaaagagctgattggcgcagttgtttaa

SEQ ID NO: 887142 - DNA, 75 bp, synthetic construct
  source 1..75: mol_type = other DNA
atttttctttctagaaaactagggaggaaatcactctgttctgcattgttgcgagatggtgcaaaacattataat

SEQ ID NO: 887143 - DNA, 75 bp, synthetic construct
  source 1..75: mol_type = other DNA
tattctgtattagcagtaagaatgaataaggcattaaataaaagagatgttgagggtgttattaatgacgcatta

SEQ ID NO: 887144 - DNA, 75 bp, synthetic construct
  source 1..75: mol_type = other DNA
caatctgcgcggttcgcaacggtcagagtgttgacacctcaatgggaatgacgccgctggaaggcttgatgatgg

SEQ ID NO: 887145 - DNA, 75 bp, synthetic construct
  source 1..75: mol_type = other DNA
ccgagctgaaacagtacgttctcaagttcgagcgcgaggacggcatcagctggctcagtcacttcggagaaatca

SEQ ID NO: 887146 - DNA, 75 bp, synthetic construct
  source 1..75: mol_type = other DNA
atatgaaatggaatcagtacagtactgaactttcgctgactgatgcgcttgagcttgtgcgtgctgacccggatt

SEQ ID NO: 887147 - DNA, 75 bp, synthetic construct
  source 1..75: mol_type = other DNA
ttcatttgctgatgatcaagatgcgttattaatcgtcaaaaaagacggttattccaatcttttaacgacaccaca

SEQ ID NO: 887148 - DNA, 75 bp, synthetic construct
  source 1..75: mol_type = other DNA
gtgagaaatagtgccatttttaatttagagtcgtttgaagtttttttccgatatgcaaaagagactcaacctcac

SEQ ID NO: 887149 - DNA, 75 bp, synthetic construct
  source 1..75: mol_type = other DNA
tatcaaattgtaataattacgcatggataaatcttagtcaatttaattattatgagtatttaaacccagtaagta

SEQ ID NO: 887150 - DNA, 75 bp, synthetic construct
  source 1..75: mol_type = other DNA
gaggaccggtttcatgtgctggtaatgtttccgcgcagaccaaaaataaatgcctctgatgattgtgaagtatat

SEQ ID NO: 887151 - DNA, 75 bp, synthetic construct
  source 1..75: mol_type = other DNA
ggttcaagactggtgttgagcaaaggacaaaaactgatccgcccgatgatcgttatcgtctcggcggtgatgagt

SEQ ID NO: 887152 - DNA, 75 bp, synthetic construct
  source 1..75: mol_type = other DNA
tcaaaagtttaaggctggacaataataaaataacccgcattgacactaagaatacatccgatattggaactttat

SEQ ID NO: 887153 - DNA, 75 bp, synthetic construct
  source 1..75: mol_type = other DNA
ggataacgaattgtttcactatactattaaagaagcatataccccatataatatacacacttataaaacagaaga

SEQ ID NO: 887154 - DNA, 75 bp, synthetic construct
  source 1..75: mol_type = other DNA
atccaaaatttgcatctgctggtaagtttgaaagaaaacttacgaagatactttcaacacttgataattaccaaa

SEQ ID NO: 887155 - DNA, 75 bp, synthetic construct
  source 1..75: mol_type = other DNA
atgctcaggtcaggctggcgctgggttttctgcgcgaaaccgaacctgaaatgcaggatattaatgcttttcaga

SEQ ID NO: 887156 - DNA, 75 bp, synthetic construct
  source 1..75: mol_type = other DNA
ggagtcgatggtcgatcaaatgggaaagtcagccggtgacgaatttttacgttatttgcatcgcccggatgagtc

SEQ ID NO: 887157 - DNA, 75 bp, synthetic construct
  source 1..75: mol_type = other DNA
tgcacaacggcctgctccaaccgccggccgcgcgctggccgaggccgtggcgcgtgtcggcgtaccggccgtcgt

SEQ ID NO: 887158 - DNA, 75 bp, synthetic construct
  source 1..75: mol_type = other DNA
gctcgtgacctacaaggtgtgggcggcgagcctcctgccgtgaccgcgccgctggagcagatagaccatacggtc

SEQ ID NO: 887159 - DNA, 75 bp, synthetic construct
  source 1..75: mol_type = other DNA
atcctgattttgcttcaaagggtaagtttgagcgaaagcttacccgtatcttctccgaatcgagtgaatacaaag

SEQ ID NO: 887160 - DNA, 75 bp, synthetic construct
  source 1..75: mol_type = other DNA
gtgacgccctgtttcggggcacgtctggtgcaggagggtaaccggttgcattaccttgccgaccgtgccggtatc

SEQ ID NO: 887161 - DNA, 75 bp, synthetic construct
  source 1..75: mol_type = other DNA
tgcaggggcgggtacttgatggagatttaatcactggatgggaaaaacgccaggtactgaaagaggacaatggca

SEQ ID NO: 887162 - DNA, 75 bp, synthetic construct
  source 1..75: mol_type = other DNA
tattcgaaccgatggactcagaagaacggggccgcaccgtcgaaactctggattgcacagattggcgcgatgact

SEQ ID NO: 887163 - DNA, 75 bp, synthetic construct
  source 1..75: mol_type = other DNA
gcaagggggtgaaccatgcagcagcaccaggtggtactgcatcacgggcagtccgggaaattcgggcagcacgtg

SEQ ID NO: 887164 - DNA, 75 bp, synthetic construct
  source 1..75: mol_type = other DNA
tgtcgacaccgcacatcggctggcggaagatatcctgcgcttcgcccgctgccgccagggtggtgcactgacctg

SEQ ID NO: 887165 - DNA, 75 bp, synthetic construct
  source 1..75: mol_type = other DNA
gacaacaccacgccaggaaaattgctggttcaggagatcgagtatgtaagggacagaacgccagccgggctatat

SEQ ID NO: 887166 - DNA, 75 bp, synthetic construct
  source 1..75: mol_type = other DNA
tcacgggcagttcaggaaattcgggcagcacgtgagcagtgggaacgtgaaaacggatttatcagcgacggaaac

SEQ ID NO: 887167 - DNA, 75 bp, synthetic construct
  source 1..75: mol_type = other DNA
atctaaatattatgaagatggggcaaacattaaatgatattacatcctctattttaattcacatcaaatcaattc

SEQ ID NO: 887168 - DNA, 75 bp, synthetic construct
  source 1..75: mol_type = other DNA
tacaagaagaagcaccatctttaggaaaacctgtactagttacaagaaacactacagagcgaccggaagctgttg

SEQ ID NO: 887169 - DNA, 75 bp, synthetic construct
  source 1..75: mol_type = other DNA
ataacaggtcatagaagagaaaactttgggattggttttgataatatatgtttcgcaattcgtgacgcagcattg

SEQ ID NO: 887170 - DNA, 75 bp, synthetic construct
  source 1..75: mol_type = other DNA
tgtgggaactcatgggggaggtttattcgaaccgctggacccagaagaacggggccgcaccttcgaagctctgga

SEQ ID NO: 887171 - DNA, 75 bp, synthetic construct
  source 1..75: mol_type = other DNA
ggaaggcctgagcgaacccatcgggaaatttccgatgaccgatggctggcatccgtcgccggattttcgacgacg

SEQ ID NO: 887172 - DNA, 75 bp, synthetic construct
  source 1..75: mol_type = other DNA
cgccatcgcagacaacggagcccgaatatctgtacggcctgagcgaacccatcggaaaatttccgatgaccgatg

SEQ ID NO: 887173 - DNA, 75 bp, synthetic construct
  source 1..75: mol_type = other DNA
cgttggaagcgctccagcgtttctggccagacaaagaggccatcctctacgatgcgctgcgctatcttagccaac

SEQ ID NO: 887174 - DNA, 75 bp, synthetic construct
  source 1..75: mol_type = other DNA
ccctgccgggaaaaatcagggaatgccctgtttattttcctgatgacagaacaatcaaaaataacggagataaaa

SEQ ID NO: 887175 - DNA, 75 bp, synthetic construct
  source 1..75: mol_type = other DNA
agcgactggtactgaaacgcttttcagagagaggcggagtccgtcccccgctcctgaacccgggtgaacgaagtc

SEQ ID NO: 887176 - DNA, 75 bp, synthetic construct
  source 1..75: mol_type = other DNA
cgcggctgatgctgcagattatgtcagggagactgaccggtcactgatgcaactggtctccctgccggaaaaaat

SEQ ID NO: 887177 - DNA, 75 bp, synthetic construct
  source 1..75: mol_type = other DNA
ccggaaaaatgaaatgtgtccgggtgggaaccgcagatgaacatctgaaggaagtttatacggaagacgcttccc

SEQ ID NO: 887178 - DNA, 75 bp, synthetic construct
  source 1..75: mol_type = other DNA
atcaggaaatgccctgtttatttccctgatgacagggtaaacagaaacaacggagataaaaatgaacatgcgtaa

SEQ ID NO: 887179 - DNA, 75 bp, synthetic construct
  source 1..75: mol_type = other DNA
tgcatgatcttccaggagcagaagagaaaatctgccgttaccgtgctgctgatgctgcagattatgtcagggaga

SEQ ID NO: 887180 - DNA, 75 bp, synthetic construct
  source 1..75: mol_type = other DNA
gtgggaaccgcagatgaacgactgagggaagtacttgctgaagatgcttccctgccgggaaaaatcagtaaatgc

SEQ ID NO: 887181 - DNA, 75 bp, synthetic construct
  source 1..75: mol_type = other DNA
agactgaccggtcactgatgcaactggtcaccgcattctgggcaacgctggcacttatgtatatgtcgtttgcgg

SEQ ID NO: 887182 - DNA, 75 bp, synthetic construct
  source 1..75: mol_type = other DNA
acagacagccactgccgggcagtttccggtcagtgaatgccggttttcttcctcagaccttcccggagcagaaga

SEQ ID NO: 887183 - DNA, 75 bp, synthetic construct
  source 1..75: mol_type = other DNA
atacagacagctcgctggaaagtctggttttgatgttctggattacgctggcactgatgtttatgtcgtttgcag

SEQ ID NO: 887184 - DNA, 75 bp, synthetic construct
  source 1..75: mol_type = other DNA
acaaacagcccctgacgggcaattcccggtccgtgactgcccgacagtggtcgacggtaaatacactgaaccact

SEQ ID NO: 887185 - DNA, 75 bp, synthetic construct
  source 1..75: mol_type = other DNA
ctggcactgatgtatgtctcgctggcagcgatcaccgggaaatatccggtgcgacccggaaaaatgaaatgtatc

SEQ ID NO: 887186 - DNA, 75 bp, synthetic construct
  source 1..75: mol_type = other DNA
aagaggcaaaccgtaagctcaccggggtattaaccaaatatcatttcgcgccaaccgaaaattccaaacaaaatt

SEQ ID NO: 887187 - DNA, 75 bp, synthetic construct
  source 1..75: mol_type = other DNA
acgcattatcttccgtcatgcattaaagcctgcgttgttgcccgtgctctcttatatgggacccgcattcgtcgg

SEQ ID NO: 887188 - DNA, 75 bp, synthetic construct
  source 1..75: mol_type = other DNA
catgatattgccgatggtggcgttgtcactcgcctatatcgccagtattgcgcgtattacccgtggctctatgat

SEQ ID NO: 887189 - DNA, 75 bp, synthetic construct
  source 1..75: mol_type = other DNA
ggtccgtcttttaaatataaagattattcggtcaatgacctggtagcctccagctttccggtttcagcaaaactg

SEQ ID NO: 887190 - DNA, 75 bp, synthetic construct
  source 1..75: mol_type = other DNA
gttcaaaccagccgaaggacaggagcttgatgctgctgctcttgagcagttcgagcctatcgcccgtgaactgaa

SEQ ID NO: 887191 - DNA, 75 bp, synthetic construct
  source 1..75: mol_type = other DNA
gttcaaaccagctgaaggcctggagcttgatgctgctgctctggaacagttcgaaccgatcgcccgtgaactgaa

SEQ ID NO: 887192 - DNA, 75 bp, synthetic construct
  source 1..75: mol_type = other DNA
acaccagttggtgtagtgcagagattcgccctgttcctgataagtttattgatgaagccatccataaacgccggg

SEQ ID NO: 887193 - DNA, 75 bp, synthetic construct
  source 1..75: mol_type = other DNA
atatttttcccctggctatctgcgtaagatggagcagcgttcgaagaaagaatttaaccagacatactggtggcg

SEQ ID NO: 887194 - DNA, 75 bp, synthetic construct
  source 1..75: mol_type = other DNA
cgcaaaattctggcttggtgctctactgaaaggtggtggccttggcctttacggtgactttttattgtcagatca

SEQ ID NO: 887195 - DNA, 75 bp, synthetic construct
  source 1..75: mol_type = other DNA
gcgaaagcgtggggagaagttactgaactgctgcgacgtcggttcaatgatgctggtggtgatatcgggtacctg

SEQ ID NO: 887196 - DNA, 75 bp, synthetic construct
  source 1..75: mol_type = other DNA
cataattaccggttctatggtcatcgaaaccatttatggtttacctgggatcgggcaattgtttgtgaatggtgc

SEQ ID NO: 887197 - DNA, 75 bp, synthetic construct
  source 1..75: mol_type = other DNA
tggcgacgaaacctcgccatcccagcgttcttactccgttttgcgcagtaaatttgatgcctggctgatggagca

SEQ ID NO: 887198 - DNA, 75 bp, synthetic construct
  source 1..75: mol_type = other DNA
caaattgacggcgtgatcatgcctgaggtacgcgatgaagacagccaggccgattacctgacatctccagatgaa

SEQ ID NO: 887199 - DNA, 75 bp, synthetic construct
  source 1..75: mol_type = other DNA
cttttcattttaaggatatattggtggctattcttatgttggtcgtcatactattcccttgggttataatcggtg

SEQ ID NO: 887200 - DNA, 75 bp, synthetic construct
  source 1..75: mol_type = other DNA
agcagagcaaggggccagactgttctataaccctcagcgcagaccgtgcgaaaaaagaggccgcgaacaaggctg

SEQ ID NO: 887201 - DNA, 75 bp, synthetic construct
  source 1..75: mol_type = other DNA
cagttccatgagctattatcaaaattacatcacaaacctttattagacagtaagagagaaaatatatcttcagat

SEQ ID NO: 887202 - DNA, 75 bp, synthetic construct
  source 1..75: mol_type = other DNA
acctgtcgaatacagcctgtacctgttcagtggtgacggttccaaggtaaaagttgggtctggctctcagaacct

SEQ ID NO: 887203 - DNA, 75 bp, synthetic construct
  source 1..75: mol_type = other DNA
ttgtgtgattgctaacagcttcacaatgtcaaagggaacgacagggtatatccacgacaatgcaacagtcttcaa

SEQ ID NO: 887204 - DNA, 75 bp, synthetic construct
  source 1..75: mol_type = other DNA
tattgggtagacagctccgttctgcccgtcacagtgagcagcatccgggttaaagtagaaccaaggccttacgtt

SEQ ID NO: 887205 - DNA, 75 bp, synthetic construct
  source 1..75: mol_type = other DNA
caaagtatcggtgcgtcggtctgatggcacggtggtttcaacggcgaccagccaccttcttggtgctacggatcg

SEQ ID NO: 887206 - DNA, 75 bp, synthetic construct
  source 1..75: mol_type = other DNA
atgtcattaggcaatcgcgtgattattgtcgacgcagatgaccagaagtccgtattaacctggtacaacaaccgc

SEQ ID NO: 887207 - DNA, 75 bp, synthetic construct
  source 1..75: mol_type = other DNA
ggggatatctcgttttaaacatgacgcccacgaacatgtttgtcaatgaagcaaatcaggcagctgacgtactca

SEQ ID NO: 887208 - DNA, 75 bp, synthetic construct
  source 1..75: mol_type = other DNA
gctcacagagatgcctgggctgagtctatgactattttcgaaacgcaaaatactaaagctcaagatgaaattgca

SEQ ID NO: 887209 - DNA, 75 bp, synthetic construct
  source 1..75: mol_type = other DNA
acgcgaccgtatttcgactcgtgtttattcggtagatggtacaccgttggaaagcagtggttactacggcagagc

SEQ ID NO: 887210 - DNA, 75 bp, synthetic construct
  source 1..75: mol_type = other DNA
ccaggcattgccggttagggttctcatccgtgatcagtacaaacctgatggtgactatgacgctaacacgatggg

SEQ ID NO: 887211 - DNA, 75 bp, synthetic construct
  source 1..75: mol_type = other DNA
gtttgttgggggctatcgcaattggtgttcccatcgcctgggcattattactgtgcggcatctcattgatgttct

SEQ ID NO: 887212 - DNA, 75 bp, synthetic construct
  source 1..75: mol_type = other DNA
gtactggaagaagagttgctcaaccgccgcgcccagggtgaagatccgcgctactttaccctgcgccgtcttgat

SEQ ID NO: 887213 - DNA, 75 bp, synthetic construct
  source 1..75: mol_type = other DNA
gtgtacggcatgtggggcctgtttatcttcgcgccactgttcgccgtttacttccaggagccggtcggcaatatc

SEQ ID NO: 887214 - DNA, 75 bp, synthetic construct
  source 1..75: mol_type = other DNA
gcgcccattgggatgaaatcctgcggatggccacctcgatcaagcagggcacggcgacggcctcgctgatgctca

SEQ ID NO: 887215 - DNA, 75 bp, synthetic construct
  source 1..75: mol_type = other DNA
ctgcgcgtacgtgacgacgacattcccggtctggtaatggacggcgtggtagaccttgggattatcggcgaaaac

SEQ ID NO: 887216 - DNA, 75 bp, synthetic construct
  source 1..75: mol_type = other DNA
tagctattcaaaaatcaggccgtttaagtgatgattcacgcgaactgctggcccgctgcgggattaaaatcaacc

SEQ ID NO: 887217 - DNA, 75 bp, synthetic construct
  source 1..75: mol_type = other DNA
gaaaccatggaaaaattgaaggagctgggcgccagctcgattctggttctgccaattgagaaaatgatggagtaa

SEQ ID NO: 887218 - DNA, 75 bp, synthetic construct
  source 1..75: mol_type = other DNA
ttatggtagataaacgagttgcacaattccctaaaacattaaagccaattgaccgtttggtatatttcactatgc

SEQ ID NO: 887219 - DNA, 75 bp, synthetic construct
  source 1..75: mol_type = other DNA
cttgcaagacaaaagaacaaagtatcgggtttagacccattcgatgacagtgacgatgatgacttttctttcaca

SEQ ID NO: 887220 - DNA, 75 bp, synthetic construct
  source 1..75: mol_type = other DNA
tcaaccagaatctgacagtaacccaaccaaaaattggttacctacccaaccagaatttggttacctacctaacca

SEQ ID NO: 887221 - DNA, 75 bp, synthetic construct
  source 1..75: mol_type = other DNA
ttgcaacagtgcccctgggattcctttgccgagagcgtcaccgaggcgcagaagctcgcgcaacccgatgacttc

SEQ ID NO: 887222 - DNA, 75 bp, synthetic construct
  source 1..75: mol_type = other DNA
tggggcgacggcaccacctcatcgtcggacggccagaacttccgcaccggcagcaaggccgagagcaccggccac

SEQ ID NO: 887223 - DNA, 75 bp, synthetic construct
  source 1..75: mol_type = other DNA
agcgatccggccgtccggtttgcggtctaccgtaataatatcatggcctccttaacggaagcgctggcagaaaac

SEQ ID NO: 887224 - DNA, 75 bp, synthetic construct
  source 1..75: mol_type = other DNA
attgttgatgcgcaatgtctggattgtttcgccggcagcggcgcactggggctggaagccttgtcgcgctacgct

SEQ ID NO: 887225 - DNA, 75 bp, synthetic construct
  source 1..75: mol_type = other DNA
aagccgctgctggccgctattgaaaaagcgaataaccaactggctggtatacgtcaaatcgagcaggaccgaaaa

SEQ ID NO: 887226 - DNA, 75 bp, synthetic construct
  source 1..75: mol_type = other DNA
gagtacatatcctcgaatatcagatcaagattaaaaaattattatgttatttgactaaccgttaccccaggttaa

SEQ ID NO: 887227 - DNA, 75 bp, synthetic construct
  source 1..75: mol_type = other DNA
tcaacctgaccggtgattacctatggcgcagcagcgccaagatcggcgcggggaagttcaggccgctacggcctc

SEQ ID NO: 887228 - DNA, 75 bp, synthetic construct
  source 1..75: mol_type = other DNA
ggctggaagaggcaaaagccacggatgcgccggaagtcgccatgccctggaacgacaaccttttgccccgtgaag

SEQ ID NO: 887229 - DNA, 75 bp, synthetic construct
  source 1..75: mol_type = other DNA
ctggagccgcagatcgatgaaaacaggcaaattgcatctgtaacgctttttctcagccccagaactgaacaatcc

SEQ ID NO: 887230 - DNA, 75 bp, synthetic construct
  source 1..75: mol_type = other DNA
ctcgtttatcgcggtcaaagctgttgaagcctggtttcttgccgattcagaggcaatgaaaaaatggcttaaggt

SEQ ID NO: 887231 - DNA, 75 bp, synthetic construct
  source 1..75: mol_type = other DNA
cacggcgagaaacgccagttgttgatgggtacgccagcccgcgctgtacgcagtgttagtgacgacgagttacac

SEQ ID NO: 887232 - DNA, 75 bp, synthetic construct
  source 1..75: mol_type = other DNA
cctcaacctggtgacggcggctatcgtgctgtggaacacggtgtacctggaacgcgccacccaggggttggtcga

SEQ ID NO: 887233 - DNA, 75 bp, synthetic construct
  source 1..75: mol_type = other DNA
aacctaaccggcgattacgtctggcggcagagccgcagactggaagacgggaagtttcggcccttacggatgccc

SEQ ID NO: 887234 - DNA, 75 bp, synthetic construct
  source 1..75: mol_type = other DNA
gaacggcttggccgtcgcgctgcgcgagttgggccgcatcgagcgcacgctgttcatcctcgactggctgcaaag

SEQ ID NO: 887235 - DNA, 75 bp, synthetic construct
  source 1..75: mol_type = other DNA
ctgcgggccgcgcccgccgccaaaaacgtgcttgatgccattgaggtgctgcgcggcatgaacaccgacaacgcc

SEQ ID NO: 887236 - DNA, 75 bp, synthetic construct
  source 1..75: mol_type = other DNA
gccgcatcgagcgcacgctgttcatcctcgactggctgcaaagcgtcgagctacgccgccgcgtgcatgccgggc

SEQ ID NO: 887237 - DNA, 75 bp, synthetic construct
  source 1..75: mol_type = other DNA
tccctcactcaaatacgaagtatcttagaacttttttaggacgatgtgctaataaactctttaaagtaactactt

SEQ ID NO: 887238 - DNA, 75 bp, synthetic construct
  source 1..75: mol_type = other DNA
ctggcactgatgtatgtctcgctggcagcgatcaccgggaaatatccggtgcgacccggaaaaaatgaaatgtat

SEQ ID NO: 887239 - DNA, 75 bp, synthetic construct
  source 1..75: mol_type = other DNA
acgcttccctgccgggaaaaatcaggaaatgccctgtttatcttcctgatgacagaacaaacagaaacaacggag

SEQ ID NO: 887240 - DNA, 75 bp, synthetic construct
  source 1..75: mol_type = other DNA
aggcgtgccatgccgcccggtatgttgtcgcccgggttctgcgtggactgttctggtgtctgaaatacaccgtca

SEQ ID NO: 887241 - DNA, 75 bp, synthetic construct
  source 1..75: mol_type = other DNA
accaacttccctgaatatatcgacccgcgcctgcgtaattaccgctcacgctatggcgctatcagtaatgactga

SEQ ID NO: 887242 - DNA, 75 bp, synthetic construct
  source 1..75: mol_type = other DNA
atgccagcgcctcagtatggtgcggatgacccgcgccgctgttccggcaattctgtattggaggtgctggaaaat

SEQ ID NO: 887243 - DNA, 75 bp, synthetic construct
  source 1..75: mol_type = other DNA
ttccgtatcggaggtgctggataaattcagaaaaaactacgaccggataatgtcgctaccgcaggaaacgaaaga

SEQ ID NO: 887244 - DNA, 75 bp, synthetic construct
  source 1..75: mol_type = other DNA
cgggtggtaaccgcagatgaatatctgaaggacgtttatacggaagacgcttccctgccgggaaaaatcaggaaa

SEQ ID NO: 887245 - DNA, 75 bp, synthetic construct
  source 1..75: mol_type = other DNA
actgaccggtcactgatgcaactggtcaccgcattctgggcaacgctggcacttatgtatatgtcgtttgcggca

SEQ ID NO: 887246 - DNA, 75 bp, synthetic construct
  source 1..75: mol_type = other DNA
tgccattaccgcgcggctgatgctgcagattatgtcagggagactgaccggtcactgatgcaactggtcaccgca

SEQ ID NO: 887247 - DNA, 75 bp, synthetic construct
  source 1..75: mol_type = other DNA
tggttcaggaaattgacttcgtaagacaaacagcccctgccgggcagtttcctgtaagagaatgtctgccttctc

SEQ ID NO: 887248 - DNA, 75 bp, synthetic construct
  source 1..75: mol_type = other DNA
tttggtcctccgatcttcagcagatgcctccgtactgtatacgtgcggttaccgccgcggctgatgctgcagatt

SEQ ID NO: 887249 - DNA, 75 bp, synthetic construct
  source 1..75: mol_type = other DNA
agatatgccatgccacccggtatgttgttgtccggggcctgtgttggttgttctggtgtctgaaatacgccgtca

SEQ ID NO: 887250 - DNA, 75 bp, synthetic construct
  source 1..75: mol_type = other DNA
tttcgcacagtatgtggctgatacgcacacgccagaaattcaggctgcacgcggtcgcaagggcggttctaagtc

SEQ ID NO: 887251 - DNA, 75 bp, synthetic construct
  source 1..75: mol_type = other DNA
gaaaatgaaaccggcgctgaaaaaaacgctgatggcggtagcgtgtctgagcgcagtaccggcagcccaggctgc

SEQ ID NO: 887252 - DNA, 75 bp, synthetic construct
  source 1..75: mol_type = other DNA
gaaaatgaaaccggcgctgaaaaaaacgctgatggcggtagcgtgactgagcgcagtacctgcagcccaggctgc

SEQ ID NO: 887253 - DNA, 75 bp, synthetic construct
  source 1..75: mol_type = other DNA
ctctgcttgccgagcggattgagcaagggctgtatcgtcacggggagaaattgccgtcggtacgctgcttaagtc

SEQ ID NO: 887254 - DNA, 75 bp, synthetic construct
  source 1..75: mol_type = other DNA
actcaaatacgaagtatcttaggacttttttaggacgatgtgccaataaactctttaaagtaactacttttttat

SEQ ID NO: 887255 - DNA, 75 bp, synthetic construct
  source 1..75: mol_type = other DNA
cgttaatagcaacatgccgtcctgggggcggcaattattatcccggccgcaatatgagggaatgcagaatgattt

SEQ ID NO: 887256 - DNA, 75 bp, synthetic construct
  source 1..75: mol_type = other DNA
agacaaaaataaaactgttttatcggcctgaatccattaaagcaaagcccaacgcagtatggcaggaccagctgg

SEQ ID NO: 887257 - DNA, 75 bp, synthetic construct
  source 1..75: mol_type = other DNA
gtgcctcctgcaactgctcaccggctgcggcaattcgcggacagtttacgtaccggtatcggtagtgcctctacc

SEQ ID NO: 887258 - DNA, 75 bp, synthetic construct
  source 1..75: mol_type = other DNA
aatatctgcccggtgtacagcggatgcatgtcgctgtcgtgcctggaaagaacggtccgcatggcactgaacaga

SEQ ID NO: 887259 - DNA, 75 bp, synthetic construct
  source 1..75: mol_type = other DNA
gttcctgctcgtgcagctgaacggctgcgccggtacgcggacagtttacgtaccagttccagcggtaccgctacc

SEQ ID NO: 887260 - DNA, 75 bp, synthetic construct
  source 1..75: mol_type = other DNA
tctctgctttcttctttactgttattggctctttcatctggtcagcgaatcactactacagcaaatatcagcacg

SEQ ID NO: 887261 - DNA, 75 bp, synthetic construct
  source 1..75: mol_type = other DNA
attacccgtaacgtcctgcaatcactgcaaatcgtcaatacagttatagaggttaaccagcatgcaaaacagcag

SEQ ID NO: 887262 - DNA, 75 bp, synthetic construct
  source 1..75: mol_type = other DNA
atgaaattgccagtcagagaatttgatgcagttgtgattggtgccggtggcgcaggtatgcgcgcggcgctgcaa

SEQ ID NO: 887263 - DNA, 75 bp, synthetic construct
  source 1..75: mol_type = other DNA
taagtaatctggctgaactgtattttctggcgaccaacagtaacacggcgcagtcaaacagcggccacctgtaca

SEQ ID NO: 887264 - DNA, 75 bp, synthetic construct
  source 1..75: mol_type = other DNA
aaaagaagaacgcggagaaaaaggtgcaggtaagaaagagcgcccccgcaaagctaatgacgtttccggactgac

SEQ ID NO: 887265 - DNA, 75 bp, synthetic construct
  source 1..75: mol_type = other DNA
agagcgcgtgagctacagaagactatggatgcgcagcagaaacgcctacagagcgttacagagccttttaagggg

SEQ ID NO: 887266 - DNA, 75 bp, synthetic construct
  source 1..75: mol_type = other DNA
attgtcgccccgccgatgtttgccgtggaaaaattccgcgtgctgaaggtgatttactggaagggcatgaacttc

SEQ ID NO: 887267 - DNA, 75 bp, synthetic construct
  source 1..75: mol_type = other DNA
aaagagatcgccgccagctttatgtctgtgcgccgaaccaccacacaaagcggcaacgccatgacgtttgtcgct

SEQ ID NO: 887268 - DNA, 75 bp, synthetic construct
  source 1..75: mol_type = other DNA
ttccggactgactgctgaaatgctggatgaatgggcgcgtaaaaatctttatgcctaccagctgcactgccgcga

SEQ ID NO: 887269 - DNA, 75 bp, synthetic construct
  source 1..75: mol_type = other DNA
cgtcgcgcgcctggttttggcgttactggtgaatctgttcttgtcgataaggctggtaatacggtcatgcgctgg

SEQ ID NO: 887270 - DNA, 75 bp, synthetic construct
  source 1..75: mol_type = other DNA
gcggtaataatttacagtcctgatcacggggaaatcgggcgctttgtttattaccctgaatattccattttgtaa

SEQ ID NO: 887271 - DNA, 75 bp, synthetic construct
  source 1..75: mol_type = other DNA
ctgagattgatttccaaaaaagcctggccctttatccggtgttcgatcttcatatcggtgcacttgcgcacaagg

SEQ ID NO: 887272 - DNA, 75 bp, synthetic construct
  source 1..75: mol_type = other DNA
ggaaagaggccacaccacggcagcaggcggagtttttcgcccgctctgagcaatggctggagaagaaatacggga

SEQ ID NO: 887273 - DNA, 75 bp, synthetic construct
  source 1..75: mol_type = other DNA
cgacagataaacgaagtggttgaaaatttcgttcgtccacatcctgagcagtatacgtggatcctcaagttgctg

SEQ ID NO: 887274 - DNA, 75 bp, synthetic construct
  source 1..75: mol_type = other DNA
ccacacagtgcttggccgtacagtgcatcgcgcgatgccgggctggccgatacgggcgcgggcggctatcccact

SEQ ID NO: 887275 - DNA, 75 bp, synthetic construct
  source 1..75: mol_type = other DNA
gcagaaattcaggcccagaaagcggcttatgatggtgaagggtactgcctcagcagcgcaggcggggaaccagag

SEQ ID NO: 887276 - DNA, 75 bp, synthetic construct
  source 1..75: mol_type = other DNA
aggtgaaagccggtgtctggccgctggaagataacccgctggtgaacgcgccgcacattcagagcgaactggtcg

SEQ ID NO: 887277 - DNA, 75 bp, synthetic construct
  source 1..75: mol_type = other DNA
actggatcgttttatcgatgcgatgctgtctatccgcgcagaaatcgaccaggtgaaagccggtgtttggccgct

SEQ ID NO: 887278 - DNA, 75 bp, synthetic construct
  source 1..75: mol_type = other DNA
gccactgctgccgccgaagcaatggcgatggcgaaacgcgtcagcaaactgaaaaatgccaaccgcttcttcgtg

SEQ ID NO: 887279 - DNA, 75 bp, synthetic construct
  source 1..75: mol_type = other DNA
taccacggtccggttggcctgaaacgtatcgcaaaccgcattcaccgtctgaccgatatcctggcagtgggcctg

SEQ ID NO: 887280 - DNA, 75 bp, synthetic construct
  source 1..75: mol_type = other DNA
tttgtacttcccaggtgctgctggcaaacattgccagtctgtatgccgtttaccacggtccggttggcctgaaac

SEQ ID NO: 887281 - DNA, 75 bp, synthetic construct
  source 1..75: mol_type = other DNA
gcgtgtgataaaaacggcaacatcgatctgactgatctgcgcgcgaaagcggaacaggcgggcgataacctctcc

SEQ ID NO: 887282 - DNA, 75 bp, synthetic construct
  source 1..75: mol_type = other DNA
taaccgccgccgattttgagcattttatttcaacgctttttggctatcagcagcgattacacgaaaatttacaac

SEQ ID NO: 887283 - DNA, 75 bp, synthetic construct
  source 1..75: mol_type = other DNA
gtatttcggcgtggagctgacgggaaaccccatccgcctctccaacggcgcggagatgcgattcctgtccaccaa

SEQ ID NO: 887284 - DNA, 75 bp, synthetic construct
  source 1..75: mol_type = other DNA
acagcacaataagcatcaggaaaagctggcagaaattaaacacagtgaaaatgatgcgccggcgcgtcagtccgg

SEQ ID NO: 887285 - DNA, 75 bp, synthetic construct
  source 1..75: mol_type = other DNA
ccaagcgcctgatcgactacggtttccacgcgccgaccatgtcgttcccggtggcgggtacgctgatggttgaac

SEQ ID NO: 887286 - DNA, 75 bp, synthetic construct
  source 1..75: mol_type = other DNA
gtatcgctaaccgcattcaccgtctgaccgatatcctggcggcgggcctgcaacaaaaaggtctgaagctgcgcc

SEQ ID NO: 887287 - DNA, 75 bp, synthetic construct
  source 1..75: mol_type = other DNA
tttgcgtttgaagcgttcgaaaacgcggcattaaccggtgatccgcagatatttttatcagcaagcaaacgtcag

SEQ ID NO: 887288 - DNA, 75 bp, synthetic construct
  source 1..75: mol_type = other DNA
ggcgaaacgtggtttattatcaacacgccgcgcgcctggttttggcgtcaatggcgagtcgttgctagtcgataa

SEQ ID NO: 887289 - DNA, 75 bp, synthetic construct
  source 1..75: mol_type = other DNA
tcagcataccgtgacactgtatgcgaaggggctgacctgtgaagccgacaccctcggctcctgtggttacgttta

SEQ ID NO: 887290 - DNA, 75 bp, synthetic construct
  source 1..75: mol_type = other DNA
cccgccatcagcataccgtcacgctgtatgcaaaagggctgacctgcgaagccgacaccctcggcagttgtggtt

SEQ ID NO: 887291 - DNA, 75 bp, synthetic construct
  source 1..75: mol_type = other DNA
cgcttcccgacgacaacaaagaccgcccctggtggggactgccctgcaccgtgacgccctgtttcggggcgcgtc

SEQ ID NO: 887292 - DNA, 75 bp, synthetic construct
  source 1..75: mol_type = other DNA
cccaagaagtaaaggggtttcaaaaaatgcactgaacaaagcaggttacagatgtgaagtcgatggcgaacaccc

SEQ ID NO: 887293 - DNA, 75 bp, synthetic construct
  source 1..75: mol_type = other DNA
tcagacgatgagttgatcaacgccatggaggcgaataatacatttgatgtcgcgcagacatttgaatatacaggg

SEQ ID NO: 887294 - DNA, 75 bp, synthetic construct
  source 1..75: mol_type = other DNA
tgcattaccttgccgaccgcgccggtattagaggcctgttcagcgatgcagatgcgtaccacctggaccaggcct

SEQ ID NO: 887295 - DNA, 75 bp, synthetic construct
  source 1..75: mol_type = other DNA
gtgtcagacacactgcccgggacaacgcatcccgacaacaacaacgaccgcccctggtgggggctgccctgcacc

SEQ ID NO: 887296 - DNA, 75 bp, synthetic construct
  source 1..75: mol_type = other DNA
gtatgccagagggctgacctgcgatgccgacaccctcgggtcctgtggttacgtttatctggctgtttatcctgc

SEQ ID NO: 887297 - DNA, 75 bp, synthetic construct
  source 1..75: mol_type = other DNA
cgcttcccgacgacaataacgaccgcacctggtggggactgccctgcaccgtgacgtcctgttttggtgcccgtc

SEQ ID NO: 887298 - DNA, 75 bp, synthetic construct
  source 1..75: mol_type = other DNA
cgcttcccgacgacaacaaagaccgcccctggtggggactgccctgcaccgtgacgccctgtttcggcgcccgtc

SEQ ID NO: 887299 - DNA, 75 bp, synthetic construct
  source 1..75: mol_type = other DNA
cgcttcccgacgacaacaaagaccgcccctggtggggactgccctgcaccgtgacgccctgtttcggtgctcgtc

SEQ ID NO: 887300 - DNA, 75 bp, synthetic construct
  source 1..75: mol_type = other DNA
cgcttcccgacgacaacaaagaccgcccctggtggggactgccctgcaccgtgacgccctgtttcggagcacgtc

SEQ ID NO: 887301 - DNA, 75 bp, synthetic construct
  source 1..75: mol_type = other DNA
gaaaactcagagcacattatcctgtgttcacactctgccatgtgttcggggttcatcgctgcagctacagatatt

SEQ ID NO: 887302 - DNA, 75 bp, synthetic construct
  source 1..75: mol_type = other DNA
atgtgtcaaagaaagattagtgatgaacagctaatcactgaacataacaacggtctaacgtataaacagatcgcc

SEQ ID NO: 887303 - DNA, 75 bp, synthetic construct
  source 1..75: mol_type = other DNA
cagggcaatggcttgtgaagtggatagtcgtgatgactcatcgctgatagcgtcatatataaacatcatcggtga

SEQ ID NO: 887304 - DNA, 75 bp, synthetic construct
  source 1..75: mol_type = other DNA
ctatgttgctttgcgacggaatacaacaacgttgccagcgccgactacatcagggcaatggctggagaagttgag

SEQ ID NO: 887305 - DNA, 75 bp, synthetic construct
  source 1..75: mol_type = other DNA
agcaattgatcgctgaatataacaacggtttaacgtacaagcagatcgctgaaaaatatggcatgtcaaaacgca

SEQ ID NO: 887306 - DNA, 75 bp, synthetic construct
  source 1..75: mol_type = other DNA
aaatcataaggatgtggaaatccaggtgttatcagggaatcatgaccagtctggtatgatttggctacgtgcggc

SEQ ID NO: 887307 - DNA, 75 bp, synthetic construct
  source 1..75: mol_type = other DNA
cggcaaaacattccttgcctatcatcacgggcacactatcaaaaaacccgaaaatttgttggctgcgtgcgtctc

SEQ ID NO: 887308 - DNA, 75 bp, synthetic construct
  source 1..75: mol_type = other DNA
tcgtgctggtggaagaggaaaacagctttattaccggtcgagttggccagcgtgtaaggttgcgtgatcccttca

SEQ ID NO: 887309 - DNA, 75 bp, synthetic construct
  source 1..75: mol_type = other DNA
acaacgttgccagcgccgactacatcagggcaatggctggagaagttgaggcacgccaggaaccatcgttactaa

SEQ ID NO: 887310 - DNA, 75 bp, synthetic construct
  source 1..75: mol_type = other DNA
gccccctgattaatataattcgcggtacccatgcgctgacacaaaagcaagttccgcaaggattgttaacaggaa

SEQ ID NO: 887311 - DNA, 75 bp, synthetic construct
  source 1..75: mol_type = other DNA
agccattcatcaatattattaatgctactcaacgaatgggagaaacacgtgtgccgcaaggcttactcacaggta

SEQ ID NO: 887312 - DNA, 75 bp, synthetic construct
  source 1..75: mol_type = other DNA
aacgacagagcacgttctgacgttgttatgctgcttcgcaacggaatacaacaacgtggcaagcgcagacttcat

SEQ ID NO: 887313 - DNA, 75 bp, synthetic construct
  source 1..75: mol_type = other DNA
ctatgttgctttgcgacggaatacaacaacgttgccagcgccgactacatcagggcaatggttggagaaattgat

SEQ ID NO: 887314 - DNA, 75 bp, synthetic construct
  source 1..75: mol_type = other DNA
acttcttcgtccggtaccgccggttcgacagcttcgcccatgttaaccagctactggagcagtggatggctgacg

SEQ ID NO: 887315 - DNA, 75 bp, synthetic construct
  source 1..75: mol_type = other DNA
gcggtaatcgttacagcgttcccgaagcgctgtgtggtcagccggtatcgatacgaatatcgctggatgacgagt

SEQ ID NO: 887316 - DNA, 75 bp, synthetic construct
  source 1..75: mol_type = other DNA
ctggtgtcgctgatggaccactcgccgggccagcgccagttcgccaaccgcgagaagtatcgcgaatattatcag

SEQ ID NO: 887317 - DNA, 75 bp, synthetic construct
  source 1..75: mol_type = other DNA
gttacctgaaaaagaggattacaccgcaaaagatattgatgaaaagagtgagcttactatctggaccaataccaa

SEQ ID NO: 887318 - DNA, 75 bp, synthetic construct
  source 1..75: mol_type = other DNA
tggtggatattcgacgatttgcgccgttacctgaaaaagaggattacaccgcaaaagatattgatgaaaagagtg

SEQ ID NO: 887319 - DNA, 75 bp, synthetic construct
  source 1..75: mol_type = other DNA
ggaaagcctgtgtggccagccggtatcaatacggatctcgctggatgatgaactacggatctacagtaatgagca

SEQ ID NO: 887320 - DNA, 75 bp, synthetic construct
  source 1..75: mol_type = other DNA
cgacaatgtgaagaactttgaagagactgaaaagccaactgattttgatattgaagtggaaattagacaaaatcc

SEQ ID NO: 887321 - DNA, 75 bp, synthetic construct
  source 1..75: mol_type = other DNA
agttagctgaagctaatttgactaagcattactccgataaactgaataagttaaagcaaaaacttaaaagagaac

SEQ ID NO: 887322 - DNA, 75 bp, synthetic construct
  source 1..75: mol_type = other DNA
atatgatttgcattttactgatgaaggagatgagtatgcacatatgaaaccttatcacaaaattattgccaagct

SEQ ID NO: 887323 - DNA, 75 bp, synthetic construct
  source 1..75: mol_type = other DNA
gtcaaccgtgccggcaccgtctgcatctgcgctgcgaactgccgcatcacaccacgctgccgctgtttgaaaaac

SEQ ID NO: 887324 - DNA, 75 bp, synthetic construct
  source 1..75: mol_type = other DNA
ttcttcaaagtatccctgaagggttccggttaattgatgtcagacaagcattaaggggttctggtcaatttattc

SEQ ID NO: 887325 - DNA, 75 bp, synthetic construct
  source 1..75: mol_type = other DNA
gtttatctattatgaaggaaactttaatgatggttttgggacagcgattgaagacgttcctaaagttcttcaaag

SEQ ID NO: 887326 - DNA, 75 bp, synthetic construct
  source 1..75: mol_type = other DNA
atggtggatattcgacgatttgcgccgttcctgaaaaagaggattacaccgcaaaagatattgatgaaaagagtg

SEQ ID NO: 887327 - DNA, 75 bp, synthetic construct
  source 1..75: mol_type = other DNA
acgttgtccgcagtgccagaatcaaaacttactggaatccaatgcgccggtggcagtcagtatgcgccatcaggt

SEQ ID NO: 887328 - DNA, 75 bp, synthetic construct
  source 1..75: mol_type = other DNA
acaggaacagacgcagaatgatatatgatgcgttaaccattatttgtgaagatgacatcaggaataaccctcctg

SEQ ID NO: 887329 - DNA, 75 bp, synthetic construct
  source 1..75: mol_type = other DNA
atgatatttgtactgttttggggttgtttaaggaaggcgagaatccggcacacaagcggaagagtaccaattttg

SEQ ID NO: 887330 - DNA, 75 bp, synthetic construct
  source 1..75: mol_type = other DNA
gccttgttgatgatgtcgttaagatagctcagggcattccgcttaatgctgtggaaggaaagaatgagcagactg

SEQ ID NO: 887331 - DNA, 75 bp, synthetic construct
  source 1..75: mol_type = other DNA
gccggtgggcgtgcggcatacattgcgacgtttatcgccagtacaaccatccttggcgcgctttcgcagcagtta

SEQ ID NO: 887332 - DNA, 75 bp, synthetic construct
  source 1..75: mol_type = other DNA
catcacgacagatacatttcaaagatgcagattcctatctgcaatatcaacaactttatggcgatcgctctctat

SEQ ID NO: 887333 - DNA, 75 bp, synthetic construct
  source 1..75: mol_type = other DNA
atgccgaaaatgatgaattgactgagattcaattaaaagaggttattagattaagaaaggcaataaccagaaatc

SEQ ID NO: 887334 - DNA, 75 bp, synthetic construct
  source 1..75: mol_type = other DNA
atgaataacacacaatctgataatgatttgttttattttaataggttaacgtacattacgccacacgaaatggcg

SEQ ID NO: 887335 - DNA, 75 bp, synthetic construct
  source 1..75: mol_type = other DNA
ctctcgttcagcatcctgccccgttgttgaattcagcgtgtttaatcaccagtacagaattgactcccattgtcc

SEQ ID NO: 887336 - DNA, 75 bp, synthetic construct
  source 1..75: mol_type = other DNA
cagctgacggtcaacaacgtcgccatcgagaacagcagcaacaccatcagcgacgcgctggaaaacatcaccctg

SEQ ID NO: 887337 - DNA, 75 bp, synthetic construct
  source 1..75: mol_type = other DNA
ccgccaatactgcattgtctaaagccgatcttttttccgccaccagcactaccagcagtaccaccgcattcagtg

SEQ ID NO: 887338 - DNA, 75 bp, synthetic construct
  source 1..75: mol_type = other DNA
agttctgtttgtatttgcctgtttagaaggcaattctggcagcaatcgttacggaaacgatcctaagtttggggt

SEQ ID NO: 887339 - DNA, 75 bp, synthetic construct
  source 1..75: mol_type = other DNA
gatggttttggtacttttcaagaaaacgtcacagccgtgattagtagtcttcctgctggacatcgaattgtgaag

SEQ ID NO: 887340 - DNA, 75 bp, synthetic construct
  source 1..75: mol_type = other DNA
ctgacagcacaggcggaggcgcaggaacttaaaaacgagcgcgatcgcggtgacgtgattgatactgagttttgc

SEQ ID NO: 887341 - DNA, 75 bp, synthetic construct
  source 1..75: mol_type = other DNA
ttttattaaagaaaatggtcgatgcagggtatttgggcgtgaaatcagggcaggggttttatcgctatcaacaga

SEQ ID NO: 887342 - DNA, 75 bp, synthetic construct
  source 1..75: mol_type = other DNA
ggttttccgacgtggtgcgctgcggtgtggaaaccagcaaatggaaggattaccaccccgacagcgcgtgcccgt

SEQ ID NO: 887343 - DNA, 75 bp, synthetic construct
  source 1..75: mol_type = other DNA
ttcccacagattacccccgccatgctggatgggcttaaaagggaagtggttaaagcctgtaatgccagtgccaga

SEQ ID NO: 887344 - DNA, 75 bp, synthetic construct
  source 1..75: mol_type = other DNA
cctcccgctcacaatgcaaaggcgctttcccgatataaggccgtatatgctggatgaactaaaaagggaaatagt

SEQ ID NO: 887345 - DNA, 75 bp, synthetic construct
  source 1..75: mol_type = other DNA
cgacgttattgatacagggttttgcctgtacgcgctttcaaagctggcgagccagatttcttcaatcatggacag

SEQ ID NO: 887346 - DNA, 75 bp, synthetic construct
  source 1..75: mol_type = other DNA
gcagccgaactctggcgcacagggcgaatacgcgggcctgctggcgattcgtcattatcatgaaagccgcaacga

SEQ ID NO: 887347 - DNA, 75 bp, synthetic construct
  source 1..75: mol_type = other DNA
gcgctgaatcaggctatgatcccgctgggttcctgcaccatgaaactgaacgccgccgccgagatgatcccaatc

SEQ ID NO: 887348 - DNA, 75 bp, synthetic construct
  source 1..75: mol_type = other DNA
ccgatcggtgtgaaagcgcatctggctccgtttgtaccgggtcatagcgtggtgcaaatcgaaggcatgttaacc

SEQ ID NO: 887349 - DNA, 75 bp, synthetic construct
  source 1..75: mol_type = other DNA
tcagggcagtggcgcggcagctgtacctgaagcgatggacaccgcaggaaatcaaagaggaattaaaactccctt

SEQ ID NO: 887350 - DNA, 75 bp, synthetic construct
  source 1..75: mol_type = other DNA
acagcaggtcggcactactggtgaaattcacgactacactgcgcttatcagcgaactgaaatcacgcaaaattgt

SEQ ID NO: 887351 - DNA, 75 bp, synthetic construct
  source 1..75: mol_type = other DNA
catccggtgtttaatcgctaccacagcgaaaccgaaatgatgcgctatatgcattcgctggagcgtaaagatctg

SEQ ID NO: 887352 - DNA, 75 bp, synthetic construct
  source 1..75: mol_type = other DNA
tcgcggtgacgtgattgatactgagttttgcctgtacgcgctttcaaagctggcgagtcagatttcatcaatcat

SEQ ID NO: 887353 - DNA, 75 bp, synthetic construct
  source 1..75: mol_type = other DNA
ttatcgcgccaatatgcaatcagagcgcgaacgcaagcgcggtgaacgcattgccgtaaccaacctgcgtacacc

SEQ ID NO: 887354 - DNA, 75 bp, synthetic construct
  source 1..75: mol_type = other DNA
cgaacaggtttatggcgttagggtgatttcttatgatcaaccgtttaactattcagccatcaacaatctggcagt

SEQ ID NO: 887355 - DNA, 75 bp, synthetic construct
  source 1..75: mol_type = other DNA
gccaggagaacaacaaaacagacaataatcagggcagcagtaatcagagtcagaacaggaggaaaaagagaataa

SEQ ID NO: 887356 - DNA, 75 bp, synthetic construct
  source 1..75: mol_type = other DNA
aatatgaatcacagaagaaaattgctatgcaggctgatattgagcagcttacgaagatttctcagaaatacagca

SEQ ID NO: 887357 - DNA, 75 bp, synthetic construct
  source 1..75: mol_type = other DNA
atgacaaacgatttatatattaacggtaaaaaggttgacagcttcggtgactggtcgccacagactgaacatcca

SEQ ID NO: 887358 - DNA, 75 bp, synthetic construct
  source 1..75: mol_type = other DNA
gtatgtacgatatttattccgttgtgcagggcgttgataaattcatcccggttgatgtgtatatcccgggctgcc

SEQ ID NO: 887359 - DNA, 75 bp, synthetic construct
  source 1..75: mol_type = other DNA
ggccgcattagtgtggctggcgcaccagctgcgccagacgccagaggcaaaatggatctacggcgatcacgatct

SEQ ID NO: 887360 - DNA, 75 bp, synthetic construct
  source 1..75: mol_type = other DNA
aatgcgacaacaccgcaggaaaaagctgattatcagaatgctatcaatactgaaaataacaatctgattaatgag

SEQ ID NO: 887361 - DNA, 75 bp, synthetic construct
  source 1..75: mol_type = other DNA
actcttacgagtcaggatcagattactgacagcgcaggcggaggcacaggaacttaaaaaccatcgcgagagtgg

SEQ ID NO: 887362 - DNA, 75 bp, synthetic construct
  source 1..75: mol_type = other DNA
tatgaaaccctggcaagcctgctgcaggacctgcccgtcggggtgacgctggagtctgccccgcatgggatctgc

SEQ ID NO: 887363 - DNA, 75 bp, synthetic construct
  source 1..75: mol_type = other DNA
gatcattttcacagtgggctggccgccgatgaacccggctaccagcgcagggcggtgagcgcccaggagctctcc

SEQ ID NO: 887364 - DNA, 75 bp, synthetic construct
  source 1..75: mol_type = other DNA
cagggcaccctgcgtgcccgccagccgcggggtgaaacccgcctgcgctggcagtgtcagggcatctggcatgaa

SEQ ID NO: 887365 - DNA, 75 bp, synthetic construct
  source 1..75: mol_type = other DNA
aattggcagccacacacaattttggaccatgcacactatatggaattatggacaggggacggactcgccgcagga

SEQ ID NO: 887366 - DNA, 75 bp, synthetic construct
  source 1..75: mol_type = other DNA
ttgcctgatttacgcggtgaatttattcgtggctgggatgacggtcgcgggattgatactggtcgcgctttgctt

SEQ ID NO: 887367 - DNA, 75 bp, synthetic construct
  source 1..75: mol_type = other DNA
ttggggtgcctgttccgtggccttcagccactccgccaacaggctggttgaaatgcaatggtgcggctttttctg

SEQ ID NO: 887368 - DNA, 75 bp, synthetic construct
  source 1..75: mol_type = other DNA
accgccatattgttgtagctaacgatgggtatgacacaaaggatgaatgggagttggccacaattttcaaaaaaa

SEQ ID NO: 887369 - DNA, 75 bp, synthetic construct
  source 1..75: mol_type = other DNA
tctgcattacctgttggtgtccctgttccgtggccttccgccactccgccaacaggctggctgaaatgcaacggt

SEQ ID NO: 887370 - DNA, 75 bp, synthetic construct
  source 1..75: mol_type = other DNA
atgccatttgcttgttatttcttcattttcataaacgttggtttgggagaaggttcggcattacccgttggggtg

SEQ ID NO: 887371 - DNA, 75 bp, synthetic construct
  source 1..75: mol_type = other DNA
tcggtattgccttcggcaacttgctgctcggcgtgccgtttgccttcacaccgcaattacgcgtggaatatctcg

SEQ ID NO: 887372 - DNA, 75 bp, synthetic construct
  source 1..75: mol_type = other DNA
tttattcgtggctgggatgatggacgtggagtggacaatgggcgagcattattaagcaggcaggaggctacaaat

SEQ ID NO: 887373 - DNA, 75 bp, synthetic construct
  source 1..75: mol_type = other DNA
gctctcgaaaaccttggtttaggagaaggctcagcattgcctgttggcgtacctgttccgtggccctcagccact

SEQ ID NO: 887374 - DNA, 75 bp, synthetic construct
  source 1..75: mol_type = other DNA
cctgatttacgtggtgagtttatgcgtggctgggatgatggaagaggcgttgatagtggcagggggattctcact

SEQ ID NO: 887375 - DNA, 75 bp, synthetic construct
  source 1..75: mol_type = other DNA
cgccaacaggctggctgaaatgcaacggtgcggcattttctgccgttgaatatcctaaactggcaaaggcttatc

SEQ ID NO: 887376 - DNA, 75 bp, synthetic construct
  source 1..75: mol_type = other DNA
aaatcgccaatgcacgctggcgtaaaatgtgggatgccggcctggtcatcggcagtctggtgccgccggtcgtct

SEQ ID NO: 887377 - DNA, 75 bp, synthetic construct
  source 1..75: mol_type = other DNA
ctgaaatgtaccccaggctggcaaaggcttatccgaccaataaattaccggatttacggggcgaatttatccgtg

SEQ ID NO: 887378 - DNA, 75 bp, synthetic construct
  source 1..75: mol_type = other DNA
atgcgtcgtttgttttctgtcgcaccggtccttctctggctgattacgcccctcgccttcgcgcaactgccgggt

SEQ ID NO: 887379 - DNA, 75 bp, synthetic construct
  source 1..75: mol_type = other DNA
atgaacggttatctcaattgcgaagatttaatcgacccggtggtgacctttgccaatagcccggaaagctatatg

SEQ ID NO: 887380 - DNA, 75 bp, synthetic construct
  source 1..75: mol_type = other DNA
aagttcgtcgtccatagagttaccaattaaaaactctatagtggatgttgcggtgtttaatggtacgtctacagc

SEQ ID NO: 887381 - DNA, 75 bp, synthetic construct
  source 1..75: mol_type = other DNA
atgcgtcgtttgttgtctgtcgcacctgtccttctctggctgattacgcccctcgccttcgcgcaactgccgggt

SEQ ID NO: 887382 - DNA, 75 bp, synthetic construct
  source 1..75: mol_type = other DNA
ggcgctgtttttgaccttttttattatgtcgccagttatcgacaaaatttatgtcgatgcctaccaaccgttcag

SEQ ID NO: 887383 - DNA, 75 bp, synthetic construct
  source 1..75: mol_type = other DNA
ttttttgattatcgacctggtgattgccagcgtgttgatggcattggggatgatgatggttcccccccgccacca

SEQ ID NO: 887384 - DNA, 75 bp, synthetic construct
  source 1..75: mol_type = other DNA
gctaagcaaaaacgagatcggttgaatccacctgactggtcgcaggttactaaggcgggctggaatatgttggac

SEQ ID NO: 887385 - DNA, 75 bp, synthetic construct
  source 1..75: mol_type = other DNA
aaaaatatgcagcgtttaacgcaaaaacattaactcaaaaagatggcgttattgatcgcaagttgcggctcatgc

SEQ ID NO: 887386 - DNA, 75 bp, synthetic construct
  source 1..75: mol_type = other DNA
ttgaacagcaaaaacggcgagatcacaaggcacaagatcaagcccaaaacactaagcaaaaacgagatcggttga

SEQ ID NO: 887387 - DNA, 75 bp, synthetic construct
  source 1..75: mol_type = other DNA
tcggtcattcccagcgtgtagggtatgatgtagcgaccagtatgatcagccagttgcaacgcattggcgaaatac

SEQ ID NO: 887388 - DNA, 75 bp, synthetic construct
  source 1..75: mol_type = other DNA
atcagcgaaccggcgcgcaatccgtttaaaacggaaagtaaccgcactacgggtgttatcagcagtaatacggta

SEQ ID NO: 887389 - DNA, 75 bp, synthetic construct
  source 1..75: mol_type = other DNA
gccgaccagaacacgcgagtctcggcgttctgcgttcgccggatattccgtcagtactggtcgaaaccggtttta

SEQ ID NO: 887390 - DNA, 75 bp, synthetic construct
  source 1..75: mol_type = other DNA
ttgctctacactctctggagctactacaaaatgtggggtcgtatgacgactgaaactcttcgccgtcacgagcat

SEQ ID NO: 887391 - DNA, 75 bp, synthetic construct
  source 1..75: mol_type = other DNA
ggccgaagggtatatcgatcaatattttgccaaagccagctacaaatttgatatcgccggtagcccgttaaccac

SEQ ID NO: 887392 - DNA, 75 bp, synthetic construct
  source 1..75: mol_type = other DNA
aatataacggtgtttccgtcacgctttctgaactgtctgcgctgcagcgtatcgagcatcttgccctcctgaaac

SEQ ID NO: 887393 - DNA, 75 bp, synthetic construct
  source 1..75: mol_type = other DNA
attgagcatcttgccctcctgaaacggcgggcagaagaggctgaagccagcggcaacctgcaggtgagtgtggaa

SEQ ID NO: 887394 - DNA, 75 bp, synthetic construct
  source 1..75: mol_type = other DNA
tgccgaggatgacgcggacgaagatgccacgatagaaaatgaggcgtcgtcttcagaggatgaaggtacagctac

SEQ ID NO: 887395 - DNA, 75 bp, synthetic construct
  source 1..75: mol_type = other DNA
gtcgttgctctctcttgtgccgctggttgctgttgtttttgcgcttttcgccgcttttccgatgttttcggacgt

SEQ ID NO: 887396 - DNA, 75 bp, synthetic construct
  source 1..75: mol_type = other DNA
acgatctttatgacggcaccgcctggctgcaggcgttgacctttggttaccgggcggctgacgtagtggatttgc

SEQ ID NO: 887397 - DNA, 75 bp, synthetic construct
  source 1..75: mol_type = other DNA
cttgagatccataaatgctctgaattatttacaggttccgtctatcgactggagcgattccggctacgtccaaca

SEQ ID NO: 887398 - DNA, 75 bp, synthetic construct
  source 1..75: mol_type = other DNA
cggtaaccggcaggtgagcgtggaggaccttgtcagaaccggggcgtttctggtggcgatgtccctgtggcataa

SEQ ID NO: 887399 - DNA, 75 bp, synthetic construct
  source 1..75: mol_type = other DNA
ggatgagcgggcctgttcatgcggatactgatattaccgaagtggcgaaaaatagcgcgctgactgatgatgatt

SEQ ID NO: 887400 - DNA, 75 bp, synthetic construct
  source 1..75: mol_type = other DNA
tctgcgctgcagcgtattgagcatcttgccctcctgaaacggcgtgcagaacaggcagaatccagcggcaacctg

SEQ ID NO: 887401 - DNA, 75 bp, synthetic construct
  source 1..75: mol_type = other DNA
gatgagcgaaaattacgaggcgaatcacctgaacctgtaatagtaatttttaattgtgaactacagaatatattc

SEQ ID NO: 887402 - DNA, 75 bp, synthetic construct
  source 1..75: mol_type = other DNA
cacctgaacctgtaatagtaatttttaattgtgaactacagaatatattcaaccaactaatagaatattacttta

SEQ ID NO: 887403 - DNA, 75 bp, synthetic construct
  source 1..75: mol_type = other DNA
gtgccaggaggttcgtaccaggcgcagggggtactgcaatcattaacggtcgtgcctggaactgacggtgtgctg

SEQ ID NO: 887404 - DNA, 75 bp, synthetic construct
  source 1..75: mol_type = other DNA
ggggcgtctggctgcaactaaaaacagtcggtgctattcacctgcgttcgcaactggcgaccaaacgcgcggctc

SEQ ID NO: 887405 - DNA, 75 bp, synthetic construct
  source 1..75: mol_type = other DNA
actcggcgtgccgtttgctttcacgccgcaattacgcgtggagtacctcggtagcttctggcaattactgacgcc

SEQ ID NO: 887406 - DNA, 75 bp, synthetic construct
  source 1..75: mol_type = other DNA
cgtgctgatattttttgcccattgtgttgctctacactctctggagctactacaaaatgtggggacgcatgacaa

SEQ ID NO: 887407 - DNA, 75 bp, synthetic construct
  source 1..75: mol_type = other DNA
tcccatatatcggaaataaacccatcgactcattaaaaacaagtgacctgttgccattattggtgaggatgagtg

SEQ ID NO: 887408 - DNA, 75 bp, synthetic construct
  source 1..75: mol_type = other DNA
caagtgacattagcattaggggtctacccagatgtctcacttgcaacagcgcggaaacggcgtgatgaagccagg

SEQ ID NO: 887409 - DNA, 75 bp, synthetic construct
  source 1..75: mol_type = other DNA
ccgctggcctttgattatcgcggaaaaatcgccgatgcacgctggcgtaaaatgtgggatgccggtctggtcatc

SEQ ID NO: 887410 - DNA, 75 bp, synthetic construct
  source 1..75: mol_type = other DNA
agtgccggggcggaaaaaaatgcatccggtaattctcatcttcgcggagccagaataaaccgatccgcagatgtc

SEQ ID NO: 887411 - DNA, 75 bp, synthetic construct
  source 1..75: mol_type = other DNA
gccacaggtgacggggatcgtgactgaagtcaccgacaaaaataatcagcttattcagaagggcgaggtgctttt

SEQ ID NO: 887412 - DNA, 75 bp, synthetic construct
  source 1..75: mol_type = other DNA
tattcgatcacggattggcatcgaagtccgatcagcgattcgcatccattcgatcaaccgggaacttaacttttt

SEQ ID NO: 887413 - DNA, 75 bp, synthetic construct
  source 1..75: mol_type = other DNA
gcaaccaggtctggttgattcttgcgggcggtgcattatttgccgcctggcccagagtctatgcagcggcgtttt

SEQ ID NO: 887414 - DNA, 75 bp, synthetic construct
  source 1..75: mol_type = other DNA
taaaccggagaagcgtactccacagaccaacagctacgcgcggaagtttctgatgaactcgcaatggcgtcccga

SEQ ID NO: 887415 - DNA, 75 bp, synthetic construct
  source 1..75: mol_type = other DNA
ccgaccaatgaagggatacggtaatcaaacccgcgcagaacgcttccgcatgctggatgcaccagcactctctcc

SEQ ID NO: 887416 - DNA, 75 bp, synthetic construct
  source 1..75: mol_type = other DNA
aaggtctgacccaggcttcccgtaacgcgaatgatggtatttctgttgcgcagaccactgaaggtgcgctgaatg

SEQ ID NO: 887417 - DNA, 75 bp, synthetic construct
  source 1..75: mol_type = other DNA
gactgctggtggtgaggctctgactgctgttgcaaatggtaaaaccacggatccgctgaaagcgctggacgatgc

SEQ ID NO: 887418 - DNA, 75 bp, synthetic construct
  source 1..75: mol_type = other DNA
tccaaaaatgcagtatctgttggtgatgctattactcaattgcctggcgagagggcagccgatgcaccagtaacc

SEQ ID NO: 887419 - DNA, 75 bp, synthetic construct
  source 1..75: mol_type = other DNA
ggtcagagaactgatcacatggtacgaaaaatacgccccattcacagaactccctgaggatataaaacaacagct

SEQ ID NO: 887420 - DNA, 75 bp, synthetic construct
  source 1..75: mol_type = other DNA
ttgcggcggatatcatcatcagccagaagcgcatcggcaacctgccagccgtgcgcgtgccgtacttccctgcga

SEQ ID NO: 887421 - DNA, 75 bp, synthetic construct
  source 1..75: mol_type = other DNA
ctaaaaacccgatgctgcaggatgtggccgtcggctggctgcagaagtaccgcaacgaagccccggcgcgcgtga

SEQ ID NO: 887422 - DNA, 75 bp, synthetic construct
  source 1..75: mol_type = other DNA
aaatcaacaacaacttgcaacgtgtgcgtgagttgaccgttcaggcgacgaccggcactaactctgattctgacc

SEQ ID NO: 887423 - DNA, 75 bp, synthetic construct
  source 1..75: mol_type = other DNA
cagaccgcagaaggtgcactgtctgaaatcaacaacaacttgcaacgtgtgcgtgagttgaccgttcaggcgacg

SEQ ID NO: 887424 - DNA, 75 bp, synthetic construct
  source 1..75: mol_type = other DNA
aagtgtccaacatgtcgaaagcgcagattattcagcaggcaggcaactccgtgctgtctaaagcgaaccaggtac

SEQ ID NO: 887425 - DNA, 75 bp, synthetic construct
  source 1..75: mol_type = other DNA
acctgcaaaaaatcgactcttctactcttggtttgaacggtttctccgtttctaaaaatgctctcgaaactagcg

SEQ ID NO: 887426 - DNA, 75 bp, synthetic construct
  source 1..75: mol_type = other DNA
ttccaaggtaaaaactacgctacaacggtttcaaaggcacttgatgataatactgcggcaaaagcaacagataat

SEQ ID NO: 887427 - DNA, 75 bp, synthetic construct
  source 1..75: mol_type = other DNA
ttgacaaattccgctcctccctcggtgccgttcaaaaccgtctggattctgcggtcactaacctgaacaacacca

SEQ ID NO: 887428 - DNA, 75 bp, synthetic construct
  source 1..75: mol_type = other DNA
atttccatattcgttacaaacagctcgacctgtgggcgcgtttccaggactttcagacccgtatccgtgacgcga

SEQ ID NO: 887429 - DNA, 75 bp, synthetic construct
  source 1..75: mol_type = other DNA
cttctcccaaaaataatcaaagccatggacgcacttggtaagaataacgccgtgtcaaattacctgatcgccgaa

SEQ ID NO: 887430 - DNA, 75 bp, synthetic construct
  source 1..75: mol_type = other DNA
tattgtgatggcggccatgttcaacatgctgaccatgcaggtgctgaaggggtatgttgtcgccctgatgtggct

SEQ ID NO: 887431 - DNA, 75 bp, synthetic construct
  source 1..75: mol_type = other DNA
aaagtggatgcgccgttcgatatcaaacttctgcataccgttcgtggcatggggtatgtccttgaagtccggtct

SEQ ID NO: 887432 - DNA, 75 bp, synthetic construct
  source 1..75: mol_type = other DNA
cgagatattccattcaaaggaactcgccacaacgcgcttgatgatgccattcaccaagccaaatacgtttcagcg

SEQ ID NO: 887433 - DNA, 75 bp, synthetic construct
  source 1..75: mol_type = other DNA
acgtaagaacaatcgtcgagcttggaaaggtaataggattcgaccctaagcgagatattccattcaaaggaactc

SEQ ID NO: 887434 - DNA, 75 bp, synthetic construct
  source 1..75: mol_type = other DNA
atgcgatatcgggcgcgtcctgacgcttcaacgattttatggtggctggaacagagtgaagaagccagaaaatcg

SEQ ID NO: 887435 - DNA, 75 bp, synthetic construct
  source 1..75: mol_type = other DNA
attcattctggcgatcattacgctgcgtctgccgatggagtctggcaacgctgcagcgccccgatgctgctcgga

SEQ ID NO: 887436 - DNA, 75 bp, synthetic construct
  source 1..75: mol_type = other DNA
ctggtagtgggtagctcggttaaagggcatcgcgttggatcgatctcggtttgctgcgtatccagcctgcggagc

SEQ ID NO: 887437 - DNA, 75 bp, synthetic construct
  source 1..75: mol_type = other DNA
ctacagtgtaggggccaaaatatttctactgctctgggctgcaggattgggaggcacgctgtacagcctgtacag

SEQ ID NO: 887438 - DNA, 75 bp, synthetic construct
  source 1..75: mol_type = other DNA
aagacttcagagagtcttctgattacttcatcaaccagaaatcaagccagtctggaaacatcactgataacaatg

SEQ ID NO: 887439 - DNA, 75 bp, synthetic construct
  source 1..75: mol_type = other DNA
gaaagagcatcaaaccagactgcctggcgcggattcaaccaaagaactactggataaggcaacaaaattagaaaa

SEQ ID NO: 887440 - DNA, 75 bp, synthetic construct
  source 1..75: mol_type = other DNA
aaagaaaagtcgtgcatttaaccgcgcactatcaattatgttggtatcgctgatcaccttcattgtttgttgcat

SEQ ID NO: 887441 - DNA, 75 bp, synthetic construct
  source 1..75: mol_type = other DNA
gatctgaatttaagtgatgttactgatactaatggtaaggtaaccacaactgcgactgagcaatttgaaggtgct

SEQ ID NO: 887442 - DNA, 75 bp, synthetic construct
  source 1..75: mol_type = other DNA
tggcgcgggcatgtgcacttttacttgatgaagatactggtgatgatttgctgcgaaagaccatattcagcagtg

SEQ ID NO: 887443 - DNA, 75 bp, synthetic construct
  source 1..75: mol_type = other DNA
aggtcctgtcactatcagtgggccgtcatttacagacgccctggagcgatatacccgactgcgtagcatggagtt

SEQ ID NO: 887444 - DNA, 75 bp, synthetic construct
  source 1..75: mol_type = other DNA
cgggcaagtcgacgattatggcgaaggctggctttgttgcctgacagctggcagaaaacacaactggacggttta

SEQ ID NO: 887445 - DNA, 75 bp, synthetic construct
  source 1..75: mol_type = other DNA
tcacaccagtgaagaccatcaactcaggatctaacagaaaatattttggttctggacgaggcatcacctggtata

SEQ ID NO: 887446 - DNA, 75 bp, synthetic construct
  source 1..75: mol_type = other DNA
cgggctgaaactatcaccagcgctaatgccagactggttgattttcaggcaacgctgccactggcacagatatgg

SEQ ID NO: 887447 - DNA, 75 bp, synthetic construct
  source 1..75: mol_type = other DNA
gcaggaagatcagttgggtgcgctgggtctggtgacaaacgcagtggtgctgtggaatacgctttatatgcagga

SEQ ID NO: 887448 - DNA, 75 bp, synthetic construct
  source 1..75: mol_type = other DNA
acaaccgaaaacatcctgtccgccgttcttaccctgagggaggtccttatctcccggacacagcagattaccgtc

SEQ ID NO: 887449 - DNA, 75 bp, synthetic construct
  source 1..75: mol_type = other DNA
gtgcagacgttattgtttaacaaagcaattccaacagatgcattgatgatcagttcgattctcggctttatgacc

SEQ ID NO: 887450 - DNA, 75 bp, synthetic construct
  source 1..75: mol_type = other DNA
gccataccgtcaggaaaagccagctactccggttttacactggtactcgattcgcaacaggtcgaagaaggaaaa

SEQ ID NO: 887451 - DNA, 75 bp, synthetic construct
  source 1..75: mol_type = other DNA
ccatgatttgggtggttgttgagagcgcgctgatgtgcagtgggacgtcacgtaaccgtgggcgtttgcttgctg

SEQ ID NO: 887452 - DNA, 75 bp, synthetic construct
  source 1..75: mol_type = other DNA
gttgcgtgttcaggtctttgtcgtcattctcggcagtatcgcgatgcttagccaggcggcgatggccccagcgtt

SEQ ID NO: 887453 - DNA, 75 bp, synthetic construct
  source 1..75: mol_type = other DNA
tcggatgatgactctgatgaagactctgcttgctatggcgcattcatcgaccaagagcttgtcgggaagattgaa

SEQ ID NO: 887454 - DNA, 75 bp, synthetic construct
  source 1..75: mol_type = other DNA
catctgcaatgaaggtaaacatccttcgctgaccatcagcagcctggataaattggatgagccaccggcgctgat

SEQ ID NO: 887455 - DNA, 75 bp, synthetic construct
  source 1..75: mol_type = other DNA
acgtgaacgggcaaatcagcaactttggaagaaactggccgcgttgccggacagctggcagaccgcccgcgtgac

SEQ ID NO: 887456 - DNA, 75 bp, synthetic construct
  source 1..75: mol_type = other DNA
gatacgcgcaaagaagttgtctataccgattgggagcaggtagcgaatttcgcccgagaaatcgcccatttaacc

SEQ ID NO: 887457 - DNA, 75 bp, synthetic construct
  source 1..75: mol_type = other DNA
gtgctgttttgtgaaatcgtcaaccgctggaaacgtctgggaggctggccgctacctgccgccgaagaggtgtaa

SEQ ID NO: 887458 - DNA, 75 bp, synthetic construct
  source 1..75: mol_type = other DNA
attatccagcaggcaggtaactccgtgctgtccaaagctaaccaggttccgcagcaggttctgtctctgctgcag

SEQ ID NO: 887459 - DNA, 75 bp, synthetic construct
  source 1..75: mol_type = other DNA
gactatggcgtgctgaatgatattgccagagggcaatcagatccccgaaaaatagtccttcagtgggacgaaatg

SEQ ID NO: 887460 - DNA, 75 bp, synthetic construct
  source 1..75: mol_type = other DNA
caatatgctggggcattacacattcacgctgccggaggatattctgaagggagagcttcgccctttaaatattaa

SEQ ID NO: 887461 - DNA, 75 bp, synthetic construct
  source 1..75: mol_type = other DNA
tactgcccggagcaaccacactagtacgtctcatcagtgaaattcgtgaaagggcaaatcagcggctgtggaaaa

SEQ ID NO: 887462 - DNA, 75 bp, synthetic construct
  source 1..75: mol_type = other DNA
tacccgctacgcagaacgggttaccaccctcagagagcatactgcgctgattaaggaatattacggttaccatga

SEQ ID NO: 887463 - DNA, 75 bp, synthetic construct
  source 1..75: mol_type = other DNA
caacatgctgggacattatacgttcacactaccggaggatattatgaagggggaattgaggccgttaaatctcaa

SEQ ID NO: 887464 - DNA, 75 bp, synthetic construct
  source 1..75: mol_type = other DNA
cgagcggctgtaaccgcgccattatggtggcgcacaatgccaatttcgaccacagttttatgatggctgccgcag

SEQ ID NO: 887465 - DNA, 75 bp, synthetic construct
  source 1..75: mol_type = other DNA
cacagctttatgatggccgccgcagaacgcgcctcgctgaaacgtaacccgttccaccctttcgccacttttgac

SEQ ID NO: 887466 - DNA, 75 bp, synthetic construct
  source 1..75: mol_type = other DNA
agggacatctggctcgaaaacagcgatcgctggggaaatccccgcgagaagctgttgcagggggaagaatggcag

SEQ ID NO: 887467 - DNA, 75 bp, synthetic construct
  source 1..75: mol_type = other DNA
ggacggtgacctgattctggtgaaggatgagcctgaaaccaccgtgacggctgaacaggacgccgtgcaggtaaa

SEQ ID NO: 887468 - DNA, 75 bp, synthetic construct
  source 1..75: mol_type = other DNA
ctgacgtattacaagtcggggacctttgcgacggaggcaatccgctggcctgacagtgtggatgaacacaaaaag

SEQ ID NO: 887469 - DNA, 75 bp, synthetic construct
  source 1..75: mol_type = other DNA
caacaccggcactgacgcccctgatgctggatgaagctaccgggaaactggtggtctgggacggacagaaagccg

SEQ ID NO: 887470 - DNA, 75 bp, synthetic construct
  source 1..75: mol_type = other DNA
cggtcgtgaacaacgacggtgacagtgccatcagtaacggcggcaccggcacgcaggttaacggtgatgaagcca

SEQ ID NO: 887471 - DNA, 75 bp, synthetic construct
  source 1..75: mol_type = other DNA
accgtcccccaatccccgggtcatttttgccagtgacagacgggctgacggggagatgagtggtattcgcctggc

SEQ ID NO: 887472 - DNA, 75 bp, synthetic construct
  source 1..75: mol_type = other DNA
gatgagcctgaaaccaccgtgacggctgaacaggacgccgtgcaggtaaaagcgaaggcgaagagagagaaacag

SEQ ID NO: 887473 - DNA, 75 bp, synthetic construct
  source 1..75: mol_type = other DNA
gatagtgttgttaatgtcgataaattaacgtacgccggaaacctggaatcacttgcagatgtttctgattctgaa

SEQ ID NO: 887474 - DNA, 75 bp, synthetic construct
  source 1..75: mol_type = other DNA
agaaatcttatcgtgagcaaattacttatgttgctgatcgcccagggcatgatcgccgttatgcaattgatgccg

SEQ ID NO: 887475 - DNA, 75 bp, synthetic construct
  source 1..75: mol_type = other DNA
gttatataccgtcgtaaccgaaggtaaagcgggtgaaacttataacattggcggacacaacgaaaagaaaaacat

SEQ ID NO: 887476 - DNA, 75 bp, synthetic construct
  source 1..75: mol_type = other DNA
gcgcgataagcaagaagttgaacacaccggagaggttaacctgattcagcgcattcaggaggccagaaaacgcgc

SEQ ID NO: 887477 - DNA, 75 bp, synthetic construct
  source 1..75: mol_type = other DNA
tatcatttcccagaaaaacttattccattggttattctgaatgctctggaaggtcaagcgttacctatttatggt

SEQ ID NO: 887478 - DNA, 75 bp, synthetic construct
  source 1..75: mol_type = other DNA
tcgtcacataataaataatacgcaagatagtgttgttaatgtcgataaattaacatacgccggaaacctggaatc

SEQ ID NO: 887479 - DNA, 75 bp, synthetic construct
  source 1..75: mol_type = other DNA
gtcaccgatccggattccatcggtattcagatcgacggcgacaaggcagttgtcaataacgaaggtgacaacgcc

SEQ ID NO: 887480 - DNA, 75 bp, synthetic construct
  source 1..75: mol_type = other DNA
gatttataacagtgaggttttcgaatatcttgcgtttcatcgtatctcgttcgaagcattgaccgctgaagatcc

SEQ ID NO: 887481 - DNA, 75 bp, synthetic construct
  source 1..75: mol_type = other DNA
gctaagtcggaagatcaggcaaaggctaagctcgctgagtttcagcagcagtacggtcgtgccattgatgtcggg

SEQ ID NO: 887482 - DNA, 75 bp, synthetic construct
  source 1..75: mol_type = other DNA
ctataagtccttggccttggacgctgcgcgttcctggactccctttctatgccaagtcggaagaccaggcaaagg

SEQ ID NO: 887483 - DNA, 75 bp, synthetic construct
  source 1..75: mol_type = other DNA
ctgatgcagggggatgcgcaggatgatccggcaattcgtctgcaactttgctccggtcgactggacagcaaaatc

SEQ ID NO: 887484 - DNA, 75 bp, synthetic construct
  source 1..75: mol_type = other DNA
tgggcgaaagattctaaaaaagcctctattcataaagatgccgccgtttttgaaagtgaaatttatgaatacctc

SEQ ID NO: 887485 - DNA, 75 bp, synthetic construct
  source 1..75: mol_type = other DNA
tatctggcatttcaccgtatctcattcgaagtattgaccgctgaagatccagaagaattcaaatcccgtgcaaaa

SEQ ID NO: 887486 - DNA, 75 bp, synthetic construct
  source 1..75: mol_type = other DNA
taaaaattatcaacgttacctgaaaggcagccaggcggcggtaaatccgttctcagaacgtgatatcgacgatgc

SEQ ID NO: 887487 - DNA, 75 bp, synthetic construct
  source 1..75: mol_type = other DNA
atgacggcgacgcataatataaagacgctgcgcgcgcagctcactgaagcgcaggccaacaccacccaggtttca

SEQ ID NO: 887488 - DNA, 75 bp, synthetic construct
  source 1..75: mol_type = other DNA
tgttaactttactttctataagaaaaaaacaatatatgtttcaattggtacattgcttgcggtagcgataaatat

SEQ ID NO: 887489 - DNA, 75 bp, synthetic construct
  source 1..75: mol_type = other DNA
ctggataagctgaaaaaccgccacaaccagcaggtggtgctgttccataaactggaaaacctgcgcgatcgtctg

SEQ ID NO: 887490 - DNA, 75 bp, synthetic construct
  source 1..75: mol_type = other DNA
tgggtcagtaaaagtgaaattaaacgtgatgccgaggagctaaaacgcctgggcgcagaaattgttgatctgggg

SEQ ID NO: 887491 - DNA, 75 bp, synthetic construct
  source 1..75: mol_type = other DNA
tcaaatactggctaaatttggctgattcttatgcggtgggatggataccatctgagactttatttaccgagattg

SEQ ID NO: 887492 - DNA, 75 bp, synthetic construct
  source 1..75: mol_type = other DNA
cagtgtcataccgtgaacaaatcacctatgttgccgatcgtccaggccatgaccgtcgatacgcgatcgatgcgg

SEQ ID NO: 887493 - DNA, 75 bp, synthetic construct
  source 1..75: mol_type = other DNA
agaactggctaaagatttgggtattactaggcaagcattatacaaatggttatccggtgacagtcagcctgatga

SEQ ID NO: 887494 - DNA, 75 bp, synthetic construct
  source 1..75: mol_type = other DNA
agaagtgctgtctccatcaatgtcagaactggcaaaggatttggggataactcggcaggctctctataaatggtt

SEQ ID NO: 887495 - DNA, 75 bp, synthetic construct
  source 1..75: mol_type = other DNA
taggctctgtagatcgatattctccaaatttgcagtcaagctcatgtgtatcaggtgttgttgctgtcgccgcat

SEQ ID NO: 887496 - DNA, 75 bp, synthetic construct
  source 1..75: mol_type = other DNA
acggttaaaaaagcggtcgctcaactggtaaaagaaggcatattaatacaagtccaggggaaaggaacatttgtt

SEQ ID NO: 887497 - DNA, 75 bp, synthetic construct
  source 1..75: mol_type = other DNA
ggtccaggggaagggaacatttgtcaaaaaagagaacgtggcatatccgttaggtgaaggattattgtcattcgc

SEQ ID NO: 887498 - DNA, 75 bp, synthetic construct
  source 1..75: mol_type = other DNA
ccgatccgaaaaaacgggtagtcgcctacgagttctccagactcccgtctgaagtgcaaactgaaattgacgaag

SEQ ID NO: 887499 - DNA, 75 bp, synthetic construct
  source 1..75: mol_type = other DNA
aaactaacgccgtttcaaacctggtagtggatagttttagacaagatgaatataaagataaagaaagcgggaaaa

SEQ ID NO: 887500 - DNA, 75 bp, synthetic construct
  source 1..75: mol_type = other DNA
gcaccggatcataaaaactttcgtgaatgcggcgatcaattcatgcgttattttctgcgtgggctggcagcgcgc

SEQ ID NO: 887501 - DNA, 75 bp, synthetic construct
  source 1..75: mol_type = other DNA
agcaggaggaattttactctatggaacaatgcatctttgatttcggcattataaactataatcccgccattacat

SEQ ID NO: 887502 - DNA, 75 bp, synthetic construct
  source 1..75: mol_type = other DNA
ggacagcacagcggggggaatttcaaaaatgacccgcagcgcgcatctgaagcaggaaaaaaagggggcaaaagc

SEQ ID NO: 887503 - DNA, 75 bp, synthetic construct
  source 1..75: mol_type = other DNA
agtggatagttttagacaagatgaatataaagataaagaaagcgggaaaatactaaaatataatttctttattcc

SEQ ID NO: 887504 - DNA, 75 bp, synthetic construct
  source 1..75: mol_type = other DNA
agcaacttttccaaaatcaacgacaatatcgtgttccattctatcaacgtgcctacgtatggacgcaacaaaacc

SEQ ID NO: 887505 - DNA, 75 bp, synthetic construct
  source 1..75: mol_type = other DNA
cccggcgaaccctattgccagcaacagcactgctgaaggtaaagcgcaaaaccgtcgcgtagaaattaccttaag

SEQ ID NO: 887506 - DNA, 75 bp, synthetic construct
  source 1..75: mol_type = other DNA
gcagctcactgctgaaccttatgcgtttggcgagcagctaaccctggtggactgttatctctgcgttatgcgcac

SEQ ID NO: 887507 - DNA, 75 bp, synthetic construct
  source 1..75: mol_type = other DNA
tcaacgcgaacagagtatcgccttgctggcaaaaacaatgggcttacctgcgccagtgattgcctcgtatcttga

SEQ ID NO: 887508 - DNA, 75 bp, synthetic construct
  source 1..75: mol_type = other DNA
tcttgatggcgacaagaaaaatagcttccgttttcatcatatttctactgacgaagtctatggtgatttgcctca

SEQ ID NO: 887509 - DNA, 75 bp, synthetic construct
  source 1..75: mol_type = other DNA
atgaagaaacgtgtttatcttattgctgccgtcgtgagcggcgctctggcggtatctggctgtacaactaaccct

SEQ ID NO: 887510 - DNA, 75 bp, synthetic construct
  source 1..75: mol_type = other DNA
tattacatggatgtgcaggaagcgaagctgcgtgacaaaatgcgcggcactggtgttagcgtaacccgcagcggg

SEQ ID NO: 887511 - DNA, 75 bp, synthetic construct
  source 1..75: mol_type = other DNA
cagatctgcaagtaaagcgcctcaaacaatatgcatcacaatataaagaattggttgatggttttggcacaaccc

SEQ ID NO: 887512 - DNA, 75 bp, synthetic construct
  source 1..75: mol_type = other DNA
aaatcctggagcggggtaaaaagttgggggaaattgcattgaaagtatggccaaaaacacgattaatgcaattaa

SEQ ID NO: 887513 - DNA, 75 bp, synthetic construct
  source 1..75: mol_type = other DNA
tcaaactgtggccaacttttcgagaccaaactcattttattcaaagttttaatgttgaaaatattgacgatctcc

SEQ ID NO: 887514 - DNA, 75 bp, synthetic construct
  source 1..75: mol_type = other DNA
ccttttactgcgtgcactgcgtcaggccggacttaagtttaccgatatccaacccacggtaatgactccaactta

SEQ ID NO: 887515 - DNA, 75 bp, synthetic construct
  source 1..75: mol_type = other DNA
gatcttaaaggccacaaagttgcgttccagaaaggttccagttcacacaatcttttactgcgcgcactacgccag

SEQ ID NO: 887516 - DNA, 75 bp, synthetic construct
  source 1..75: mol_type = other DNA
atgattgttctaaatcagattaactcctcacttttgtacaatgtcgcttacaggtataccatgaaatccgagacg

SEQ ID NO: 887517 - DNA, 75 bp, synthetic construct
  source 1..75: mol_type = other DNA
ggtgattgtctggcttttactgcgccagttgccgattcgcaccacacgacatttcccggcaatggctgccgtgcg

SEQ ID NO: 887518 - DNA, 75 bp, synthetic construct
  source 1..75: mol_type = other DNA
agcggagccgatttgttcgttgcctggatgcactcgatggggcaaaacctggtggagtcggtggcgattacggtg

SEQ ID NO: 887519 - DNA, 75 bp, synthetic construct
  source 1..75: mol_type = other DNA
gcctggtcgccggttgcctggcgcgagcgggttggtttcgcaccctgccaaaagtcgttgtcagcggcgtgatta

SEQ ID NO: 887520 - DNA, 75 bp, synthetic construct
  source 1..75: mol_type = other DNA
tcatagtcacacatccaagatacaggcctctcttctaatgcagctctacttcaacattggtggagaagccgtgtt

SEQ ID NO: 887521 - DNA, 75 bp, synthetic construct
  source 1..75: mol_type = other DNA
tgttcataataacggtgacaatgccctttttagctgcagaaccctggaagccatggattgcctgctaagttatgg

SEQ ID NO: 887522 - DNA, 75 bp, synthetic construct
  source 1..75: mol_type = other DNA
gaatttattaccggcgagcgtaccagcgaaggcttcttccgtactcatgcaggtattgaacaagcgatcagccgt

SEQ ID NO: 887523 - DNA, 75 bp, synthetic construct
  source 1..75: mol_type = other DNA
cgagtatggaagagttagctgggtatgtggagatggtgaattatgaacaaattgcgatcaataaaaccagtgtta

SEQ ID NO: 887524 - DNA, 75 bp, synthetic construct
  source 1..75: mol_type = other DNA
ctacagatagacaatgctttcacagcttgcgcgggatgtttatcacttgtcttgatcgtgccggagttagcgaga

SEQ ID NO: 887525 - DNA, 75 bp, synthetic construct
  source 1..75: mol_type = other DNA
ccaaccctgctggttgcacgtaccgatgctgatgcggcggatctgatcacctccgattgcgacccgtatgacagc

SEQ ID NO: 887526 - DNA, 75 bp, synthetic construct
  source 1..75: mol_type = other DNA
gggtacaggttacttcgataaagtgacgactattattcagggcggcacgtcttcagtcaccgcgctgaccggctc

SEQ ID NO: 887527 - DNA, 75 bp, synthetic construct
  source 1..75: mol_type = other DNA
aacaccttccgtcgtgccgatcagatccagtggtctgctggtattgaaccgggcgatccgcgttatgtcgattac

SEQ ID NO: 887528 - DNA, 75 bp, synthetic construct
  source 1..75: mol_type = other DNA
cttcggagttgagaagcggggatgcgatgctggaggtgtgcgataactgcaagtgtacttacttcacctctgtta

SEQ ID NO: 887529 - DNA, 75 bp, synthetic construct
  source 1..75: mol_type = other DNA
cgtccggaatttaaaaccgctcagtttgccgatggcgtcgagacaatgaacgacctgcaaccgggtatgatcctc

SEQ ID NO: 887530 - DNA, 75 bp, synthetic construct
  source 1..75: mol_type = other DNA
cgaaactgagcgtttctatctcgacgtgcagaagcagttcccgaaagtgaccgcgcagaaagtgatcgtcagcga

SEQ ID NO: 887531 - DNA, 75 bp, synthetic construct
  source 1..75: mol_type = other DNA
cgggtctgcgcaccggggtaaaagtcgcggtggtcgatgcaactggcaagctggtggcgaccgacaccatttatc

SEQ ID NO: 887532 - DNA, 75 bp, synthetic construct
  source 1..75: mol_type = other DNA
ccgcccggcagcaaaaccgcgtggccgtgaaacgcagcctgccggtaacagcgcgatgatggatgcgctggcggc

SEQ ID NO: 887533 - DNA, 75 bp, synthetic construct
  source 1..75: mol_type = other DNA
ctgcgtgcgacgatgggcctcgatccgggtctgcgtaccggggtaaaagtagcggtagtcgatgcgaccggtaaa

SEQ ID NO: 887534 - DNA, 75 bp, synthetic construct
  source 1..75: mol_type = other DNA
atgttccgtgggcgtaacgaaggcgtactccagctttcgctgaatgccgatccacagttcgatgagccgccgaaa

SEQ ID NO: 887535 - DNA, 75 bp, synthetic construct
  source 1..75: mol_type = other DNA
tactccagctttcgctgaatgccgatccacagttcgatgagccgccgaaagagagttattgcgaacaaatcatta

SEQ ID NO: 887536 - DNA, 75 bp, synthetic construct
  source 1..75: mol_type = other DNA
tctggtggcgatgtccctgtggcataaccatccgcagaaaacggggtcaccgtcaatgaatgaggctgtgatgca

SEQ ID NO: 887537 - DNA, 75 bp, synthetic construct
  source 1..75: mol_type = other DNA
ctttccgaattgtctgcgctgcagcgtattgagcatcttgccctcctgaaacggcgtgcagaacaggcagaatcc

SEQ ID NO: 887538 - DNA, 75 bp, synthetic construct
  source 1..75: mol_type = other DNA
agagagacgtcaggcgatcctcaagtccatttctgagcaaggtaaactcaccgatgagctggcgaatgccatcaa

SEQ ID NO: 887539 - DNA, 75 bp, synthetic construct
  source 1..75: mol_type = other DNA
cagacgcaactggcccgcaaactggacgcagtagtagaagactgcgtaaacgccgttggcgtcgatctcaacact

SEQ ID NO: 887540 - DNA, 75 bp, synthetic construct
  source 1..75: mol_type = other DNA
ctggtagcgaccgataccatttacccgcacaccggacaagccgcaaaagcagcgatgactgttgctgcgctgtgt

SEQ ID NO: 887541 - DNA, 75 bp, synthetic construct
  source 1..75: mol_type = other DNA
ggaacagatgcaaaaactacttgatgcagcggagccagagatcaggaacattatattaatgggcttgttttccgg

SEQ ID NO: 887542 - DNA, 75 bp, synthetic construct
  source 1..75: mol_type = other DNA
agcaagaattaaaaatatctggagatgaaaaatctcagcttcgccatgagttgcaggcagaaatagcgcaggaac

SEQ ID NO: 887543 - DNA, 75 bp, synthetic construct
  source 1..75: mol_type = other DNA
cgcctccgccggtaactgggctgtcaaaaacggctggtgtcagaccatgacggaagatggtcaggcgctggtaat

SEQ ID NO: 887544 - DNA, 75 bp, synthetic construct
  source 1..75: mol_type = other DNA
agcgtgataagcttttgtctcagaagcgtgaaaaagcgtttcgacagcagcaaactaatgcaaatccccctagtt

SEQ ID NO: 887545 - DNA, 75 bp, synthetic construct
  source 1..75: mol_type = other DNA
ttcctttgtggcagcattataaaggaagaaatgaagctataaacgaagggtattggttacgagaagttattctcc

SEQ ID NO: 887546 - DNA, 75 bp, synthetic construct
  source 1..75: mol_type = other DNA
cagaaggcttcaacatgatgttgcgcgggagcatggctttgacatgagagacagagtgagcagacaggaccgaac

SEQ ID NO: 887547 - DNA, 75 bp, synthetic construct
  source 1..75: mol_type = other DNA
tttagagaacaccaggcaaaaggttgctgaagaggtatccgttgcccgtagccagatgttatctctggagcctga

SEQ ID NO: 887548 - DNA, 75 bp, synthetic construct
  source 1..75: mol_type = other DNA
tgccgttttttccccgaaacagacgaccactattaataaagactccgtactgcaggctgcccgacaggcatacgc

SEQ ID NO: 887549 - DNA, 75 bp, synthetic construct
  source 1..75: mol_type = other DNA
tgccggtttttccccgaaacagacacccgccattaataaagattccgtcctgcaggctgcccggctggcatacgc

SEQ ID NO: 887550 - DNA, 75 bp, synthetic construct
  source 1..75: mol_type = other DNA
gatggctgatattccttatcagttcgttgatgtcagtggttttgaccacgagggaacttcacgcgagttattgaa

SEQ ID NO: 887551 - DNA, 75 bp, synthetic construct
  source 1..75: mol_type = other DNA
acgtagaaaagcagtttagctctcaagccagcgaatatctgaccagtaccgtacatgcatccggacgagatttac

SEQ ID NO: 887552 - DNA, 75 bp, synthetic construct
  source 1..75: mol_type = other DNA
ggcatttggtgtacgaatggaattcacccgcggtgatatgctgaaggtctgtccgaaatttgtcacatcacttgc

SEQ ID NO: 887553 - DNA, 75 bp, synthetic construct
  source 1..75: mol_type = other DNA
atgattaaggtgtatggcgtacccggatggggctctacaatcagtgagctgatggctgatattccttatcagttc

SEQ ID NO: 887554 - DNA, 75 bp, synthetic construct
  source 1..75: mol_type = other DNA
gcagtctgccgctttccccctttttctggggcttcagtgaatacagcattgacagtgaggcgctgaacatcggca

SEQ ID NO: 887555 - DNA, 75 bp, synthetic construct
  source 1..75: mol_type = other DNA
tcgattgtccaggctcacttgtctcttggcctcaaggacatgtttatccgacctgttagtccctatgggtttgca

SEQ ID NO: 887556 - DNA, 75 bp, synthetic construct
  source 1..75: mol_type = other DNA
tataagcaacctcgctggttttcatcacttcattgatgagcaagagctgcttgatctttctgatgagcaaatcag

SEQ ID NO: 887557 - DNA, 75 bp, synthetic construct
  source 1..75: mol_type = other DNA
tcattactcgatgaaagcattctctcatgggttaaagagcggaatatcaccttctcggtctcgctcgatgggaat

SEQ ID NO: 887558 - DNA, 75 bp, synthetic construct
  source 1..75: mol_type = other DNA
tcagatgtttctttgtcagcaagtccaagactgtagccggggtgcggtacgttccgatccactcgctacttatgg

SEQ ID NO: 887559 - DNA, 75 bp, synthetic construct
  source 1..75: mol_type = other DNA
aatgttcatcacctgcttagaccgtgcaggggtgccagaacaacgtatcggggccataaccggacacacagagca

SEQ ID NO: 887560 - DNA, 75 bp, synthetic construct
  source 1..75: mol_type = other DNA
atgtctggaaatataggggcaaatccaggtcacaacctcgaagcacggcgcaccattgaaagttatcaaccgttt

SEQ ID NO: 887561 - DNA, 75 bp, synthetic construct
  source 1..75: mol_type = other DNA
aactggtacttacgaaggcttccggggtatttgctgacggtacaccttttaatgcgccggggcacacaccactcc

SEQ ID NO: 887562 - DNA, 75 bp, synthetic construct
  source 1..75: mol_type = other DNA
ggcggaacggttgacgggcagtgataaacacggccatgaggcagcggaagtgtcggattacctgctgttacaaat

SEQ ID NO: 887563 - DNA, 75 bp, synthetic construct
  source 1..75: mol_type = other DNA
gagggaacttacggtattctcaatgcggtggttgaacctaccgaactgtcagatttcagctcgttagtattggcg

SEQ ID NO: 887564 - DNA, 75 bp, synthetic construct
  source 1..75: mol_type = other DNA
tcgttgtgatcatacttgcaaatattgccaggtcagtagggcatcggtcaccgctgatggttatgacctcaatcc

SEQ ID NO: 887565 - DNA, 75 bp, synthetic construct
  source 1..75: mol_type = other DNA
gaccaaaatagggccgtccgaacgcctgccggagctgattcgttcgcacctgccgggccttgctttacaggtgct

SEQ ID NO: 887566 - DNA, 75 bp, synthetic construct
  source 1..75: mol_type = other DNA
gacagtgaggcgctgaacatcggcaaactggtactgacagaggcggccggggtgtttgccgacggtacgccgttt

SEQ ID NO: 887567 - DNA, 75 bp, synthetic construct
  source 1..75: mol_type = other DNA
atcgtgatgtccgaacaatcgttgaattaggtcgagcgattggcatcaatccgcgccgcgacataccgtttgagg

SEQ ID NO: 887568 - DNA, 75 bp, synthetic construct
  source 1..75: mol_type = other DNA
gccgctgttattttactcatgccctggccgctcagttacaccccgttatggatggtgttactttcgctggtggtg

SEQ ID NO: 887569 - DNA, 75 bp, synthetic construct
  source 1..75: mol_type = other DNA
gtggtcctgtggcaatctgatctgcgcgtctcctggcgcgcacagtggctttccttgctgatccacgggctggtt

SEQ ID NO: 887570 - DNA, 75 bp, synthetic construct
  source 1..75: mol_type = other DNA
gccaatgaatctgcatcaggcgcagaaccatgatgagaaagtgcgtatcgctaaagcggcttcgcagttggttaa

SEQ ID NO: 887571 - DNA, 75 bp, synthetic construct
  source 1..75: mol_type = other DNA
ttgccagcggtcaaactcattcaaaaatcagccttggggatattttcaaagatagctatggctatcgggtaaaga

SEQ ID NO: 887572 - DNA, 75 bp, synthetic construct
  source 1..75: mol_type = other DNA
tatggctggcagctgacagcatggacgaagccgaatggcgggatttacggcggatattgttacaacaagagacgc

SEQ ID NO: 887573 - DNA, 75 bp, synthetic construct
  source 1..75: mol_type = other DNA
gcgtctcctggcgcgcgcagtggctttccctgctgattcatgggctggttgccgcagttattttactcatgccat

SEQ ID NO: 887574 - DNA, 75 bp, synthetic construct
  source 1..75: mol_type = other DNA
gactgataacaacttttcacatcacgtcccccgggtcagagaactgatcacatggtacgagaaatatgccccatt

SEQ ID NO: 887575 - DNA, 75 bp, synthetic construct
  source 1..75: mol_type = other DNA
ttatgcacaattggagaatgtagatgctatacaaaataagcgaaaggaattgtggagagagtattatgacaatct

SEQ ID NO: 887576 - DNA, 75 bp, synthetic construct
  source 1..75: mol_type = other DNA
ggctgaccggagaagacagcgtcgccagttctgcgaccgtgatgacctgctggaatgaggtgatggcagatatgg

SEQ ID NO: 887577 - DNA, 75 bp, synthetic construct
  source 1..75: mol_type = other DNA
ctgccagcggccccgctcggcctgaaatccgcccaggcgatattttcaaagataaatatggtggacgaataacga

SEQ ID NO: 887578 - DNA, 75 bp, synthetic construct
  source 1..75: mol_type = other DNA
gcgtcttcttcttctacccggctgactttactttcgtatgcccgaccgaactgggtgacgttgctgaccactacg

SEQ ID NO: 887579 - DNA, 75 bp, synthetic construct
  source 1..75: mol_type = other DNA
atgaaacttaaatattctggcttaactgccagcggccccgctcggcctgaaatccgtaacggcgatatttaccgc

SEQ ID NO: 887580 - DNA, 75 bp, synthetic construct
  source 1..75: mol_type = other DNA
ccgtggtatgccgattttgtgcgcgagagttttatcagcgtgcatcagtatgcgcaggagattaataacccgcag

SEQ ID NO: 887581 - DNA, 75 bp, synthetic construct
  source 1..75: mol_type = other DNA
tccacggtgtgtgcgaaagaagccgacggtctggcagacgttggttcgccgctgccgggtcgggaagtgaaaatc

SEQ ID NO: 887582 - DNA, 75 bp, synthetic construct
  source 1..75: mol_type = other DNA
gctgccggggcgggaagtgaaaatcgttaatgatgaagtgtggctgcgggctgccagtatggcagaaggttactg

SEQ ID NO: 887583 - DNA, 75 bp, synthetic construct
  source 1..75: mol_type = other DNA
ccgcctgaactgaaaaacggcggtattaaaatttcacgtcaggcgctaaaagagtgggtgcaacgtcagcaataa

SEQ ID NO: 887584 - DNA, 75 bp, synthetic construct
  source 1..75: mol_type = other DNA
gtcaacgatgaggtgtggctacgggccgccagtatggcggaaggttactggcgtaacgggcaactggtgccgctg

SEQ ID NO: 887585 - DNA, 75 bp, synthetic construct
  source 1..75: mol_type = other DNA
ttttcagcaaccggtgcgttggttaacgttaccatcagaactgaaaaacggcggtattaaaatttcacgtcgggc

SEQ ID NO: 887586 - DNA, 75 bp, synthetic construct
  source 1..75: mol_type = other DNA
gctgcccggtcgggaagtgaaagttgttaacgatgaggtatggttgcgcgctgccagtatggcagaaggttactg

SEQ ID NO: 887587 - DNA, 75 bp, synthetic construct
  source 1..75: mol_type = other DNA
aaagaagagtacaaaaatcaggaaggcaagccggaagtgaaggcgcgcgtgcggcggctgcaacggcagctggcg

SEQ ID NO: 887588 - DNA, 75 bp, synthetic construct
  source 1..75: mol_type = other DNA
ccggcggctggctgtttctgccgaaaaaaatcctcccggatttcagcaaaatcagcccgttaaaaggcattgggc

SEQ ID NO: 887589 - DNA, 75 bp, synthetic construct
  source 1..75: mol_type = other DNA
ccgttcaaactggcgatgaatgagggtttgtcgctctacgccagcgtgatgcgcaactttgtcatcctgtttatt

SEQ ID NO: 887590 - DNA, 75 bp, synthetic construct
  source 1..75: mol_type = other DNA
atgaaaaataaaaattctggctttaccgccagcggccctgctcgtcctgaatttatgaacggcgatatttaccgc

SEQ ID NO: 887591 - DNA, 75 bp, synthetic construct
  source 1..75: mol_type = other DNA
cgccgtttgtggtggcgaaaggcaccgatgaaatcgccctctatattcgccaggtcgccactgagaatcaggtgg

SEQ ID NO: 887592 - DNA, 75 bp, synthetic construct
  source 1..75: mol_type = other DNA
gcgctcggtttactacaccacgcaggtgaaccagcaaattccgtttcagctttaccgggccatcgcccacgttct

SEQ ID NO: 887593 - DNA, 75 bp, synthetic construct
  source 1..75: mol_type = other DNA
cgccggatgcgtccgtggaagacgtgcaggatgtgaaagcggcttatgcggttctggcggcctcagagctggcca

SEQ ID NO: 887594 - DNA, 75 bp, synthetic construct
  source 1..75: mol_type = other DNA
caaatcagccggtagcgtagcggcggcaaacatcatcatcgcctataacgaatccgcgtcgtgtaaacccgaaaa

SEQ ID NO: 887595 - DNA, 75 bp, synthetic construct
  source 1..75: mol_type = other DNA
acgatactcgataccctgacgagctattttcagcagatttatggcagtgacgcttatctggagccagacagcaaa

SEQ ID NO: 887596 - DNA, 75 bp, synthetic construct
  source 1..75: mol_type = other DNA
ttactccccggctaacctcggcgtggtcagtggtggcagcgcacgctattacgacattcaggagctgctgattgg

SEQ ID NO: 887597 - DNA, 75 bp, synthetic construct
  source 1..75: mol_type = other DNA
attttcagcagatttatggtagtgatgcctacctcgaaccggacagtaaagacggtcagatggtggctctgatgg

SEQ ID NO: 887598 - DNA, 75 bp, synthetic construct
  source 1..75: mol_type = other DNA
acgaactctacggttgatttgcttcttacaggaactgccggaacaaccatcattaatggcagcgtgaaagacagt

SEQ ID NO: 887599 - DNA, 75 bp, synthetic construct
  source 1..75: mol_type = other DNA
acgatactcagcaccctgattagctattttcagcagatttatggcagtgatgcctacctcgaaccggacagcaaa

SEQ ID NO: 887600 - DNA, 75 bp, synthetic construct
  source 1..75: mol_type = other DNA
acttctgtcacggtgccggatacttacggtaatcctcacgtcatcagtttttcacgctctaccgatgtgccaatt

SEQ ID NO: 887601 - DNA, 75 bp, synthetic construct
  source 1..75: mol_type = other DNA
actggatattcccggcgtaacacgcgtacgtatttacgagaacgacgctgataccgtggatgctaatggtctgcc

SEQ ID NO: 887602 - DNA, 75 bp, synthetic construct
  source 1..75: mol_type = other DNA
tttatcgaaatagtcatcgcaacttacccaggctatacgtcacaagttgccgaggaaatgaaagcggagatttcg

SEQ ID NO: 887603 - DNA, 75 bp, synthetic construct
  source 1..75: mol_type = other DNA
cacaagctgtatgagaacgatacagataacactgattcaaatggcctgccgccgcactcaatcgcggccattgtt

SEQ ID NO: 887604 - DNA, 75 bp, synthetic construct
  source 1..75: mol_type = other DNA
tcgaaggtgaggccggaacgttaatcacaaacggctctgtgaaagatgccaacggcatcatctggaatcttcctg

SEQ ID NO: 887605 - DNA, 75 bp, synthetic construct
  source 1..75: mol_type = other DNA
gtcaccaacccagcagcggctacggttggttctccggccgagacagacgcggagcttcgcatccggcagggccag

SEQ ID NO: 887606 - DNA, 75 bp, synthetic construct
  source 1..75: mol_type = other DNA
cgtttcgcggtgtgccattcctggtatttcgcgaacagcgtgaacgcggtgggcgtaatatcgttcgccgggaat

SEQ ID NO: 887607 - DNA, 75 bp, synthetic construct
  source 1..75: mol_type = other DNA
gcgacagcggcgaaactgaaagcgaacccgcaaccagagctgttgaagcacaaagttattgccagctgtttcttc

SEQ ID NO: 887608 - DNA, 75 bp, synthetic construct
  source 1..75: mol_type = other DNA
ggggatggtaatgatggcgttgatgcgctggttgaagattattatcgcagacacccggagaaaacgccgccgtgg

SEQ ID NO: 887609 - DNA, 75 bp, synthetic construct
  source 1..75: mol_type = other DNA
ttacagaccgatgatcatcattgccgacagcaaaattacggcgaaggatgcacaggcccgcgccctgcgtgagca

SEQ ID NO: 887610 - DNA, 75 bp, synthetic construct
  source 1..75: mol_type = other DNA
tgttgctggcgtggcagtggtacggtgattacagccgtgcggcagagctgcaacgtctgaacccgcagctgcgtg

SEQ ID NO: 887611 - DNA, 75 bp, synthetic construct
  source 1..75: mol_type = other DNA
acccgcaaccagagctgttgaagcacaaagttattgccagctgtttcttcgaagcctctacccgtacccgcctct

SEQ ID NO: 887612 - DNA, 75 bp, synthetic construct
  source 1..75: mol_type = other DNA
taaagtgattgccagttgcttcttcgaagcctctacccgcacccgcctctctttcgaaacctcgatgcaccgcct

SEQ ID NO: 887613 - DNA, 75 bp, synthetic construct
  source 1..75: mol_type = other DNA
aaatggtatttcacgtaaaggcgcgacgaattctacggttgatttgcttcttacaggaactgccggaacaaccat

SEQ ID NO: 887614 - DNA, 75 bp, synthetic construct
  source 1..75: mol_type = other DNA
actggcggggatgtttgtcaccctgacggcattacccacgatccctgcgctctcccttacccggaagaataccgg

SEQ ID NO: 887615 - DNA, 75 bp, synthetic construct
  source 1..75: mol_type = other DNA
gatccacagcgtctgattgggcttaccccgccagctcaacaaaatatccggcttctcagggcagtgatgcagagt

SEQ ID NO: 887616 - DNA, 75 bp, synthetic construct
  source 1..75: mol_type = other DNA
cctgattgactgtgctgccgtttacagtggcgggcagtggaaaaaccgcacactggagcagattgcgcgtgacct

SEQ ID NO: 887617 - DNA, 75 bp, synthetic construct
  source 1..75: mol_type = other DNA
cttattcaccattcaggaaacccaggggcgtctggacaatctccacgtcgcaatggttggtgacctgaaatatgg

SEQ ID NO: 887618 - DNA, 75 bp, synthetic construct
  source 1..75: mol_type = other DNA
tcgcgatgaccttaatctggtgctggcgacagcggcgaaactgaaagcgaacccgcaaccagagctgttgaagca

SEQ ID NO: 887619 - DNA, 75 bp, synthetic construct
  source 1..75: mol_type = other DNA
gcagcagaagcatttcaggagacacttaattatcagtctgaacctttaaccattggtaaggcaaataaaatcgca

SEQ ID NO: 887620 - DNA, 75 bp, synthetic construct
  source 1..75: mol_type = other DNA
tggcgccggatctcaccacctttgcgaaatcgatcgcaggcggcttcccgctggcgggcgtcaccgggcgcgccg

SEQ ID NO: 887621 - DNA, 75 bp, synthetic construct
  source 1..75: mol_type = other DNA
ctggcgggcgtcaccgggcgcgcggaagtgatggatgccgtcgctccaggcggtctgggcggcacctatgcgggt

SEQ ID NO: 887622 - DNA, 75 bp, synthetic construct
  source 1..75: mol_type = other DNA
tggcagaggcgcgactggtaagagaaaacgagctcaataagatacgcgaaaaacaacttcaggcattaagtgatg

SEQ ID NO: 887623 - DNA, 75 bp, synthetic construct
  source 1..75: mol_type = other DNA
ttaagtctgacacatctgattatcagcctgaacctttaagtcttggtaaggcaaaagagcttgcatcagcgtgta

SEQ ID NO: 887624 - DNA, 75 bp, synthetic construct
  source 1..75: mol_type = other DNA
ttctggcttttatatttattggcgttatggctatgattgtatgtattcctttttacatcgtttaccttgcgcaac

SEQ ID NO: 887625 - DNA, 75 bp, synthetic construct
  source 1..75: mol_type = other DNA
gacgtatttagcgatcgcgaagccagctacatgtcacaaaaaaaccacttcggctacgcggcctgcgccgccctt

SEQ ID NO: 887626 - DNA, 75 bp, synthetic construct
  source 1..75: mol_type = other DNA
ctacaaaaagcagagaagaaaaaaaacattgtctggcgttatgaaaacttttcactggagtggcagtccgccatc

SEQ ID NO: 887627 - DNA, 75 bp, synthetic construct
  source 1..75: mol_type = other DNA
tcgaagacaaaaagctgcctgcacagcaaaaagcacgcgatgaatactggcgtacgctgttacaaacgctgatag

SEQ ID NO: 887628 - DNA, 75 bp, synthetic construct
  source 1..75: mol_type = other DNA
cacggcatcagtgaagatgatgctatcgccagtatccaccgaatttttaaaaatgatgctgcgccggaagatatc

SEQ ID NO: 887629 - DNA, 75 bp, synthetic construct
  source 1..75: mol_type = other DNA
accggacgccaaactcaccgccgagatcgtggcgcgtgctcgcgataaaggcctgattcttctctcctgcggccc

SEQ ID NO: 887630 - DNA, 75 bp, synthetic construct
  source 1..75: mol_type = other DNA
ccggacgcaaaactcaccgccgagatcgtggcacgcgcccgcgataaaggcctgattcttctctcctgcggcccg

SEQ ID NO: 887631 - DNA, 75 bp, synthetic construct
  source 1..75: mol_type = other DNA
tatggctatgttgatatgtggtcttttttacaatgactaccttgagcaacaacctgcaacaccagaacaactgac

SEQ ID NO: 887632 - DNA, 75 bp, synthetic construct
  source 1..75: mol_type = other DNA
tggcaagaatatgaagcctctggtggcaagcttaagctaaacgtgcctgcaaacgtaagtacagagcaaatgaaa

SEQ ID NO: 887633 - DNA, 75 bp, synthetic construct
  source 1..75: mol_type = other DNA
agattaatgccttgcacggaacgttactggagttcggcgaaaccgtccacaaaggccgggccgcgatggacagag

SEQ ID NO: 887634 - DNA, 75 bp, synthetic construct
  source 1..75: mol_type = other DNA
atatcgcaaaacatctgattcaggttcacttcatcgatgagcacacgggggaagtggttgataaacagctgcgtc

SEQ ID NO: 887635 - DNA, 75 bp, synthetic construct
  source 1..75: mol_type = other DNA
cctccgcctttaagtcgggacgggaattcgccgcgtttatcggtctggtgcccaaacagactggctcaggaggga

SEQ ID NO: 887636 - DNA, 75 bp, synthetic construct
  source 1..75: mol_type = other DNA
gcatttcgttgatgaacataccggagagattatcgataagcaggttaagcgtgagaaattccttgaatatttcag

SEQ ID NO: 887637 - DNA, 75 bp, synthetic construct
  source 1..75: mol_type = other DNA
aaacgtaagtacagagcaaatgaaagtgttaagtgacaatgagaaactgatggacgatctgggggcaaatgggct

SEQ ID NO: 887638 - DNA, 75 bp, synthetic construct
  source 1..75: mol_type = other DNA
tcacttcattgatgagaacacaggtgaagtggtggataagcaacttcgcagcagagattttcttgaatatttcag

SEQ ID NO: 887639 - DNA, 75 bp, synthetic construct
  source 1..75: mol_type = other DNA
agctccctgaagcactggagcggatgaaagagagactgccgccgtatctcattactgtgctggaaaaccagtaca

SEQ ID NO: 887640 - DNA, 75 bp, synthetic construct
  source 1..75: mol_type = other DNA
cagcattactgcccaaagaacctggtccgtggataaccgaactgaaaaaacgtcgtccaaccagcgtggcaatcg

SEQ ID NO: 887641 - DNA, 75 bp, synthetic construct
  source 1..75: mol_type = other DNA
acaggcgagttctgttgtttcaattacgttgattggtggcgctggatttaacgtggggtcacctcaacaggcagg

SEQ ID NO: 887642 - DNA, 75 bp, synthetic construct
  source 1..75: mol_type = other DNA
atcaccgtgcttgaagaccagtacaccaggttgagtgagctggatatgctgatagatgaccttgaaaagcagctt

SEQ ID NO: 887643 - DNA, 75 bp, synthetic construct
  source 1..75: mol_type = other DNA
actgggcacgggagctgacaaagctggggcataaagtccgcttgttgcaggcccgcttcgttaaggcattcgtca

SEQ ID NO: 887644 - DNA, 75 bp, synthetic construct
  source 1..75: mol_type = other DNA
cagtcgcgcatttcctgaagagcctctggatgtggtcattggaagagcagaccgggcaatgtatgagggtaagca

SEQ ID NO: 887645 - DNA, 75 bp, synthetic construct
  source 1..75: mol_type = other DNA
atgacgcgaaagtttatgctcgggtatcgttcagataaattacaggccggattaatgccctccagtgttaatcgt

SEQ ID NO: 887646 - DNA, 75 bp, synthetic construct
  source 1..75: mol_type = other DNA
aaacagggcgtcacggtgcagggcagcccccaccaggggcggtcgtgattgtcgtcgggaagtgttgtcccgggg

SEQ ID NO: 887647 - DNA, 75 bp, synthetic construct
  source 1..75: mol_type = other DNA
tttatcaggcgcaggaaggagaaaagcatgacccgttctgatgatacccatgaaaacgaggcaaacatgacgccg

SEQ ID NO: 887648 - DNA, 75 bp, synthetic construct
  source 1..75: mol_type = other DNA
cctcgcggtagtggtaacaaaagcgcgtttacgtggaatcggttttacatcgagaaagatgatccgagtacgtga

SEQ ID NO: 887649 - DNA, 75 bp, synthetic construct
  source 1..75: mol_type = other DNA
cagacataccaccgaaccaggcaactcatattctgcgtcataccttcgcaagtcatttcatgatgaacggaggaa

SEQ ID NO: 887650 - DNA, 75 bp, synthetic construct
  source 1..75: mol_type = other DNA
ttaagcgtgtactgaaaaataacgccgccgcagtcatccttgtccacaaccaccccagcggcgagcctgaaccca

SEQ ID NO: 887651 - DNA, 75 bp, synthetic construct
  source 1..75: mol_type = other DNA
gccgctgttcatacttatcaggcccatcttgccagtgcgcaaggtgtgttatcgctgataccgtttggcgatcac

SEQ ID NO: 887652 - DNA, 75 bp, synthetic construct
  source 1..75: mol_type = other DNA
agcgtttgtgctccatgaccttaacttctggttccaccggtttgccgaaagccgctgtccatacctgccaggcac

SEQ ID NO: 887653 - DNA, 75 bp, synthetic construct
  source 1..75: mol_type = other DNA
gcgtaacggacaactggtgccgctggtgaatgacgaaggctggtacgctacgcgcgatcgcggcgagatgcataa

SEQ ID NO: 887654 - DNA, 75 bp, synthetic construct
  source 1..75: mol_type = other DNA
acaggccacaccacgcagacagcccaccagcaacgcaaaggcacgggcaaatattcagaaaatgaaaaacatgat

SEQ ID NO: 887655 - DNA, 75 bp, synthetic construct
  source 1..75: mol_type = other DNA
aagccgccaacgctgaaccattgttaatgcaaatacgtctgcctgcaaactatggtcgccgttataatgaagcct

SEQ ID NO: 887656 - DNA, 75 bp, synthetic construct
  source 1..75: mol_type = other DNA
atggaaatgaaaaattctggctttattgccagcggccccgctcgacctgaatttatgaacggcgatatttaccgc

SEQ ID NO: 887657 - DNA, 75 bp, synthetic construct
  source 1..75: mol_type = other DNA
aaatgggaaaaagcgcacggttccgatatcggaagaactggagaaagagatcaagaccagcgacaccgggccact

SEQ ID NO: 887658 - DNA, 75 bp, synthetic construct
  source 1..75: mol_type = other DNA
cgaaggtgataagccaactccaggcgagatcggcgcatacaccaaagccgaagttgataagatgtttgttaagcc

SEQ ID NO: 887659 - DNA, 75 bp, synthetic construct
  source 1..75: mol_type = other DNA
gactatcacttctacccgtgatactctcaatgcttcaatcactgctggcgataccgcagccaacaaacgaattga

SEQ ID NO: 887660 - DNA, 75 bp, synthetic construct
  source 1..75: mol_type = other DNA
gccggaagcagtaggtattcaatccaccgaagatccagaaaatccagaagcaattaagactatttctaactctgc

SEQ ID NO: 887661 - DNA, 75 bp, synthetic construct
  source 1..75: mol_type = other DNA
gcaacttatgatgcaaatcgaattgttaaatgtggtttttatgatgaatacaatttccataaaggaacatttaga

SEQ ID NO: 887662 - DNA, 75 bp, synthetic construct
  source 1..75: mol_type = other DNA
gctggtctagttggcgtgaccgtgcttccggtttgcaagttgattgcccccaatcaaaagattcagcacataaca

SEQ ID NO: 887663 - DNA, 75 bp, synthetic construct
  source 1..75: mol_type = other DNA
cggcaacaattccacaaggtggtcgaggctttttcatccgtattttcggtggaaatggttataacgttaatagtc

SEQ ID NO: 887664 - DNA, 75 bp, synthetic construct
  source 1..75: mol_type = other DNA
ggatcggttatgccaatgctgatactaacgtttttgaatggtatagtgatgtaggtggcagttctattcgtcaac

SEQ ID NO: 887665 - DNA, 75 bp, synthetic construct
  source 1..75: mol_type = other DNA
aaaggtcgtttccgacaacaagaaagatgctgatactaaaatcagtaaccttactggcactgttaacagcaacca

SEQ ID NO: 887666 - DNA, 75 bp, synthetic construct
  source 1..75: mol_type = other DNA
atgacgtacgctcactttgccccggactatctggctgatgcaatcaggtttaatcccatgaaagggagtgtccat

SEQ ID NO: 887667 - DNA, 75 bp, synthetic construct
  source 1..75: mol_type = other DNA
gatagtcgtaaacaaatatttgaatgcggtgatgaaagcgggtggcattggtattcgcagcgtgctggtggtccg

SEQ ID NO: 887668 - DNA, 75 bp, synthetic construct
  source 1..75: mol_type = other DNA
acgttcaattaggcggtgatggtaacgaagatgcattaacgttagaacgtgcttctcgtgccgctcgctttagta

SEQ ID NO: 887669 - DNA, 75 bp, synthetic construct
  source 1..75: mol_type = other DNA
tggtaattatggtgcattctggcgtaatgacggcgttaaagtttatcttctttctactgccgaaaatgataaatt

SEQ ID NO: 887670 - DNA, 75 bp, synthetic construct
  source 1..75: mol_type = other DNA
caaaagtgcagggcgatgtggcggcctggtttggctcgttaccagtagtgccggaagggtgtaaagccagtccgt

SEQ ID NO: 887671 - DNA, 75 bp, synthetic construct
  source 1..75: mol_type = other DNA
cgcgtagtgacgcaacgtagtggcgtggcacagggtaaattcaaagctctgctcatcgagaatttcgcaggccgt

SEQ ID NO: 887672 - DNA, 75 bp, synthetic construct
  source 1..75: mol_type = other DNA
gcttgagaaatctgccaaagcagaaagcaaagccccgcaagcaagccataaaggacgctaaggcagaggttattg

SEQ ID NO: 887673 - DNA, 75 bp, synthetic construct
  source 1..75: mol_type = other DNA
gtctggaaggcacctgggttaaagccgacggtcagcagggatacttcctgcaacgtatgactccaacctacgctt

SEQ ID NO: 887674 - DNA, 75 bp, synthetic construct
  source 1..75: mol_type = other DNA
aaccggactattgaagagtctgcctacagcctggatgcggtctacaccattcaggatggtcgcgccaaaggcacg

SEQ ID NO: 887675 - DNA, 75 bp, synthetic construct
  source 1..75: mol_type = other DNA
ggttttaactatttcgataaaatcgccttctggaaaacgcctatagcagaagggggcaagtttgttccctacagt

SEQ ID NO: 887676 - DNA, 75 bp, synthetic construct
  source 1..75: mol_type = other DNA
cagcgggaaccggcgttactggcgggtgcaggcgtgctggcgtccgagagtgaagggatacgctttgtgcgtggc

SEQ ID NO: 887677 - DNA, 75 bp, synthetic construct
  source 1..75: mol_type = other DNA
gggcttgtgagaaagttgaacatcatcaactggtggcgatgaaccaggccttactgttgagctataccgtgggaa

SEQ ID NO: 887678 - DNA, 75 bp, synthetic construct
  source 1..75: mol_type = other DNA
atgatttgggtggttgttgagagcgcgctgatgtgcagtgggacgtcacgtaaccgtgggcgtttgcttgctgcg

SEQ ID NO: 887679 - DNA, 75 bp, synthetic construct
  source 1..75: mol_type = other DNA
ggagttaagaagtggcaagctcgaaggaatgatgatgccctatcagcgcggatatctatcggcgattagtaagtt

SEQ ID NO: 887680 - DNA, 75 bp, synthetic construct
  source 1..75: mol_type = other DNA
gctcaggaaaaggtatcgcgccgacgacaacagggttgaatctgcatcaccatcttgagaaaaacctcaaaggcc

SEQ ID NO: 887681 - DNA, 75 bp, synthetic construct
  source 1..75: mol_type = other DNA
tcagtgcaggcgattcctgtggcagtacgcataaccctgcattcgccacaatggggcgaaattgaacgcatctga

SEQ ID NO: 887682 - DNA, 75 bp, synthetic construct
  source 1..75: mol_type = other DNA
tgttagcgccgcactggagctttatgccgggtacttatcagggcgcggaagccggggctaattttgattacggtg

SEQ ID NO: 887683 - DNA, 75 bp, synthetic construct
  source 1..75: mol_type = other DNA
attgccagtactacaaccagctccatcaactaccgttggttgcccttcctctcccgtttgacgaagcccagcaaa

SEQ ID NO: 887684 - DNA, 75 bp, synthetic construct
  source 1..75: mol_type = other DNA
ctggcggcagaatcaccgctaatgatgatcatgcttaatgcgctgtcgaaacggatctaccaacgttacccgcag

SEQ ID NO: 887685 - DNA, 75 bp, synthetic construct
  source 1..75: mol_type = other DNA
accgatgctgacctgcttaacgagtcaggcgtcactacgctgattcgccgcgacggtttccgattctggggtaac

SEQ ID NO: 887686 - DNA, 75 bp, synthetic construct
  source 1..75: mol_type = other DNA
tccgggcgaaagtgtggtcatcaactgtggttccaccgcattcctgctcggaagggaaatgtgtggcaagcctgt

SEQ ID NO: 887687 - DNA, 75 bp, synthetic construct
  source 1..75: mol_type = other DNA
acaaccaatggtcacattatgtcctataacaatatccatatcattaaaatcaccacgcagcccaatagttacccc

SEQ ID NO: 887688 - DNA, 75 bp, synthetic construct
  source 1..75: mol_type = other DNA
gctggacaatgtattgcaagaatcaggacgcgaacgcacgattgctatgagtctaccggaatttgagcaggcgct

SEQ ID NO: 887689 - DNA, 75 bp, synthetic construct
  source 1..75: mol_type = other DNA
gttattgatgaaatactgagtaaagaaaatctgtcatggtgctcaaaaaactctctaccaatattgcattctttt

SEQ ID NO: 887690 - DNA, 75 bp, synthetic construct
  source 1..75: mol_type = other DNA
ttgttttacaaactcgaaacggtgatatttatgaatgtaaaaaaatcccatatcattttctttttacttttatca

SEQ ID NO: 887691 - DNA, 75 bp, synthetic construct
  source 1..75: mol_type = other DNA
aaagaagatatattcatcaactatgtgccgttatctatgagcgctggaatcgcacttcatccattcatcaaagat

SEQ ID NO: 887692 - DNA, 75 bp, synthetic construct
  source 1..75: mol_type = other DNA
caccgcgcaggtgctggccgatacgatggctgaggcacacatgtgggcggtggacaagcccatcaccgcaacgct

SEQ ID NO: 887693 - DNA, 75 bp, synthetic construct
  source 1..75: mol_type = other DNA
cgaaggtatccgcgccaaaatgcgcagcttggtcagtcaggggtatctcattggtggtgattgctggctggacga

SEQ ID NO: 887694 - DNA, 75 bp, synthetic construct
  source 1..75: mol_type = other DNA
atgtgggcagttgatatgccgctgaatccatcactggcccgcgacattatcgaaggtatccgcgccaaaatgcgc

SEQ ID NO: 887695 - DNA, 75 bp, synthetic construct
  source 1..75: mol_type = other DNA
gtctgcttggcccgtcttttactgccatgctaatgcagaatttctctgataatctgctgtttatcatgatcgcca

SEQ ID NO: 887696 - DNA, 75 bp, synthetic construct
  source 1..75: mol_type = other DNA
aaagcttgccttgttatattcagggaaaaaatatataaaatttaaatctgagttaagaaaattcacttataaatt

SEQ ID NO: 887697 - DNA, 75 bp, synthetic construct
  source 1..75: mol_type = other DNA
gacaccgcgcggcctgaagtttgaactggcagcagaatcaccgctaatgatgatcatgcttaatgcgctgtcgaa

SEQ ID NO: 887698 - DNA, 75 bp, synthetic construct
  source 1..75: mol_type = other DNA
gcctgccggaattcgagcagtcactgtttatggcagcacagcccgacaatctgctactggcgaccgcgccgcgct

SEQ ID NO: 887699 - DNA, 75 bp, synthetic construct
  source 1..75: mol_type = other DNA
ggctcatgccatggttctggaggcaaattcaaagactgtaataccggattttttgccagtatttatgcagtctga

SEQ ID NO: 887700 - DNA, 75 bp, synthetic construct
  source 1..75: mol_type = other DNA
gatatctattacttgctaattggtatgatagctagttttgtattacttttgatcttaaaaatgatcccgttatat

SEQ ID NO: 887701 - DNA, 75 bp, synthetic construct
  source 1..75: mol_type = other DNA
tattggttaagtggttggataaacgagattacatacaattatttcctgtatttatattattaatagcagcgactt

SEQ ID NO: 887702 - DNA, 75 bp, synthetic construct
  source 1..75: mol_type = other DNA
aatggtcagcatggagcaaaatctggcggagtggatgcaaatgagcaatttgctgctggataaaccacaccacga

SEQ ID NO: 887703 - DNA, 75 bp, synthetic construct
  source 1..75: mol_type = other DNA
actacgcttgatgttggtgttatcgttggtcaatttgactctgtaagtgccattcatggtaattctggcattggt

SEQ ID NO: 887704 - DNA, 75 bp, synthetic construct
  source 1..75: mol_type = other DNA
tgacgtgctggatattggtatgtccggcaccgaagagatctatttcgccacgttccatctcggcgtggatggcgg

SEQ ID NO: 887705 - DNA, 75 bp, synthetic construct
  source 1..75: mol_type = other DNA
gtgtcggcattaaatcgcacaatcgaaaattcacgtcctgactttgtgaccaatgtgccatcagtggactctatt

SEQ ID NO: 887706 - DNA, 75 bp, synthetic construct
  source 1..75: mol_type = other DNA
gcgaagtgcaacagcgaagaaaaggcgctgggaaaggcaaaggacaacaaactgaccgtcagtgtcggagagttc

SEQ ID NO: 887707 - DNA, 75 bp, synthetic construct
  source 1..75: mol_type = other DNA
tggggaaactgacaaaaacagaatgtacggaggctggcgggaacaggacgctggtgaaagacggtcagtcataca

SEQ ID NO: 887708 - DNA, 75 bp, synthetic construct
  source 1..75: mol_type = other DNA
acactcaacagaacgttgatgtcacgaacggtgcaatagtgatccacacccaacgcctgaaatcagatccagggg

SEQ ID NO: 887709 - DNA, 75 bp, synthetic construct
  source 1..75: mol_type = other DNA
gtctggcatgcctgcaatccgggaaaccggaccaggaaaaaacttgcaggccataacagtatctacaaaggcata

SEQ ID NO: 887710 - DNA, 75 bp, synthetic construct
  source 1..75: mol_type = other DNA
tggaagtgttgaaggtgttcgagcaggaaaatctgctgcaaaaagccaacgacctgggccagaagctaaaagacg

SEQ ID NO: 887711 - DNA, 75 bp, synthetic construct
  source 1..75: mol_type = other DNA
gacctgggccagaagctgaaagacggattgttggcaatcgccgaaaaacacccggagatcggcgatgttcgcggt

SEQ ID NO: 887712 - DNA, 75 bp, synthetic construct
  source 1..75: mol_type = other DNA
aggagagttgttaaatcttcgcatcagggatatcgatttttcttcaggaatgattgtaataaaaagacgacccaa

SEQ ID NO: 887713 - DNA, 75 bp, synthetic construct
  source 1..75: mol_type = other DNA
cggatgagtaaggccggacatgtgtcgcttcgcagggcgttgtatatgcccgcaatggtagccaccagtaagact

SEQ ID NO: 887714 - DNA, 75 bp, synthetic construct
  source 1..75: mol_type = other DNA
agacctgacagacgatgatccggatatgaaacaccgcaggaaactgctggaaagcatcccgggtatcggagagaa

SEQ ID NO: 887715 - DNA, 75 bp, synthetic construct
  source 1..75: mol_type = other DNA
tgccgcgcagtaatctgctcaccgtcggttaccgcattcatggtggttatctcgaacggttagcctggccactga

SEQ ID NO: 887716 - DNA, 75 bp, synthetic construct
  source 1..75: mol_type = other DNA
tgccatttttgcctcgctggcactgatggcgcagcaggtgactaacggcgtcacgcgcgtgaatagcgccgtcgc

SEQ ID NO: 887717 - DNA, 75 bp, synthetic construct
  source 1..75: mol_type = other DNA
ctggggaatacgctttgtccgcagtggggtaatcaatccgggaatgcagctaccacgtagtaatttactcactgt

SEQ ID NO: 887718 - DNA, 75 bp, synthetic construct
  source 1..75: mol_type = other DNA
ctataaggaagggaagactcaagggcaaccgctgtcattttcttcttaccataagatagtgagtgttgttcgtca

SEQ ID NO: 887719 - DNA, 75 bp, synthetic construct
  source 1..75: mol_type = other DNA
tgccgcgcagtaatctgctcaccgtcggttaccgcattcatgatggttatctcgaacggttagcctggccgctga

SEQ ID NO: 887720 - DNA, 75 bp, synthetic construct
  source 1..75: mol_type = other DNA
tgccgcgcagtaatctgctcactgtcggttaccgcattcatgacggttaccttgaacggttagcctggccgctga

SEQ ID NO: 887721 - DNA, 75 bp, synthetic construct
  source 1..75: mol_type = other DNA
cggtggccattgcggaggcagacggcgaaattgagccggaagagcgcaaggtgctggaagagattgccggtgttc

SEQ ID NO: 887722 - DNA, 75 bp, synthetic construct
  source 1..75: mol_type = other DNA
gcgttacgtgagatcgaggatgtgaaacacgatacgcgtgaagcggaagatgtgctggatgtggcggtggccatt

SEQ ID NO: 887723 - DNA, 75 bp, synthetic construct
  source 1..75: mol_type = other DNA
gacggcgaaattgagccggaagagcgcaaggtgctggaagagattgccggtgttctgggtcttcgtctggagaat

SEQ ID NO: 887724 - DNA, 75 bp, synthetic construct
  source 1..75: mol_type = other DNA
cagtacggtaaaaggtgacaatgtcacttttcgcgttggtgaattaaacattgatggcggaaaagtttggctgat

SEQ ID NO: 887725 - DNA, 75 bp, synthetic construct
  source 1..75: mol_type = other DNA
ctcaacgctcgctactgttaatggtcgccatcccgaaggtgaatttagcgttgataagggctatgcctgcggttt

SEQ ID NO: 887726 - DNA, 75 bp, synthetic construct
  source 1..75: mol_type = other DNA
tgccagtcggcaaactctgtgtaactctctgaaattacagccagaccaagatggcatcggcgcaacgctccagcc

SEQ ID NO: 887727 - DNA, 75 bp, synthetic construct
  source 1..75: mol_type = other DNA
cgaggcatctgagaaagcgaagatcgaacaggtcttacgtaatcagcctgcgttgtctgcgtttacctcggaaat

SEQ ID NO: 887728 - DNA, 75 bp, synthetic construct
  source 1..75: mol_type = other DNA
aggtctgcgtcgagctggcgttgttaagccggtgaaaaccgtgaaggctgttcctgtaactaaagaaaccgcagg

SEQ ID NO: 887729 - DNA, 75 bp, synthetic construct
  source 1..75: mol_type = other DNA
ttaatgaagagtctatgaaggttactgtaaatgatgataataaagtaagtaatatatctaaattaatcgatgaga

SEQ ID NO: 887730 - DNA, 75 bp, synthetic construct
  source 1..75: mol_type = other DNA
gcgaagatcgaacaggtcttacgtaatcagcctgcgttgtctgcgtttacctcggaaattaatgcgattagcgca

SEQ ID NO: 887731 - DNA, 75 bp, synthetic construct
  source 1..75: mol_type = other DNA
tggtggcctatgcagatggtgaatgtgaggcttcagagaaagcgaagatcgagcaggtcttgcgtaaccagcctg

SEQ ID NO: 887732 - DNA, 75 bp, synthetic construct
  source 1..75: mol_type = other DNA
aatcatgtcggtgctggcggatggggtgctggtctgcggcattgtggtattgctgtggccggtgataaaaagaaa

SEQ ID NO: 887733 - DNA, 75 bp, synthetic construct
  source 1..75: mol_type = other DNA
agggaacgatttgcctgcaaaccagcgcgaaagaaatttcacctgacttcatcaatgtgaaaggggaagttagtg

SEQ ID NO: 887734 - DNA, 75 bp, synthetic construct
  source 1..75: mol_type = other DNA
ggttttattatcgtcattatggcccgccagcaattatttaccgaaaacaccgtgactgcggtactacccgtcatg

SEQ ID NO: 887735 - DNA, 75 bp, synthetic construct
  source 1..75: mol_type = other DNA
agttaaatttgatggttccagcgatataaatattaatacgttagtatccagaaaccgtgttacggcattaagtgg

SEQ ID NO: 887736 - DNA, 75 bp, synthetic construct
  source 1..75: mol_type = other DNA
cgggttaattgaagcttcccgcgcaatgggtgccacgccatgcagatcgtccgtaaagtgctgttaccggaagcg

SEQ ID NO: 887737 - DNA, 75 bp, synthetic construct
  source 1..75: mol_type = other DNA
catctctggctatatgtacaacgaaaagggagaaaacctcagtaacgcccttattgaaaaagagatttacgcacc

SEQ ID NO: 887738 - DNA, 75 bp, synthetic construct
  source 1..75: mol_type = other DNA
tgagtaacaagcgtaaagaagaggcacgccagaaagcagaacatgcggaaatcattaagaaaaatgataaaaatc

SEQ ID NO: 887739 - DNA, 75 bp, synthetic construct
  source 1..75: mol_type = other DNA
tgagtaacaagcgtaaagaagaggcccgccagaaagcagaatgtgcggaaactattaagaaaaatgataaaaacc

SEQ ID NO: 887740 - DNA, 75 bp, synthetic construct
  source 1..75: mol_type = other DNA
atccctgatatgcgtggctggacgattaagggcaagcccgccagtggtcgtgccgtattgtctcaggaacaggac

SEQ ID NO: 887741 - DNA, 75 bp, synthetic construct
  source 1..75: mol_type = other DNA
gcggtcagcaaaacagactttgctgctaagcgcggtatgcgttatgtgcgggttaacgctcctgcaggtgcaata

SEQ ID NO: 887742 - DNA, 75 bp, synthetic construct
  source 1..75: mol_type = other DNA
tttatatttatccggaacgaaatgcagctgatcgggtggccgacaggtttcttgaaaaattgcctcagaaagaac

SEQ ID NO: 887743 - DNA, 75 bp, synthetic construct
  source 1..75: mol_type = other DNA
agaacgctctgctggagatcccaaccgggttaattgaagcttcccgcgcaatgggtgccacgccaatgcagatcg

SEQ ID NO: 887744 - DNA, 75 bp, synthetic construct
  source 1..75: mol_type = other DNA
cgttaatcgttaacgataacttgtcgtgcaaaaaactttttgccacagacgaaattgtagcgcgtggtggtaatc

SEQ ID NO: 887745 - DNA, 75 bp, synthetic construct
  source 1..75: mol_type = other DNA
gatggcctgtcaatatccgcacctggtgctgatctcgttgttaatgatacgacctataagtttggggcaacaaat

SEQ ID NO: 887746 - DNA, 75 bp, synthetic construct
  source 1..75: mol_type = other DNA
attatattgcaacgcattgtgatgttttttgtccctcggaaaacggtcctattcctgatattggcactgtagtaa

SEQ ID NO: 887747 - DNA, 75 bp, synthetic construct
  source 1..75: mol_type = other DNA
cttgaaaatctgatgctgcggcagcgcatcaccgatcagtatctggtgaattttgccagccaggtcagcgcgtaa

SEQ ID NO: 887748 - DNA, 75 bp, synthetic construct
  source 1..75: mol_type = other DNA
aaaaaacaggcatgaaagctctgttatctgcccagtcacagctcggcgttaaaccgcgtattctcggcgtgccag

SEQ ID NO: 887749 - DNA, 75 bp, synthetic construct
  source 1..75: mol_type = other DNA
gacggacacaatggcagaagcgcacatgtgggcagtggacaaaccgctgaacccgtcgctggcccgcgacattat

SEQ ID NO: 887750 - DNA, 75 bp, synthetic construct
  source 1..75: mol_type = other DNA
gaagccctgctgaaaatggagtgttgtggtgtatgtcataccgatcttcatgttaagaatggcgattttggtgac

SEQ ID NO: 887751 - DNA, 75 bp, synthetic construct
  source 1..75: mol_type = other DNA
gtcggtgaacgacaaagacaccctgaaagccggaaaactcaccatcgattacgactacacgccagtgccgccact

SEQ ID NO: 887752 - DNA, 75 bp, synthetic construct
  source 1..75: mol_type = other DNA
cttctggggttcccgctgtctgagcgatgatccgctttttgctttcgaaaactacactcgcacggcgcaggtgct

SEQ ID NO: 887753 - DNA, 75 bp, synthetic construct
  source 1..75: mol_type = other DNA
tgcgagaaataccagatgaataatgggtatttcagtacaacacttgggagacttatacggctgaatgctcttgca

SEQ ID NO: 887754 - DNA, 75 bp, synthetic construct
  source 1..75: mol_type = other DNA
accgcagaagggttatataaaaccgatatgctgacagcaatggcagagcagaagatgctgagcgtggtagggaaa

SEQ ID NO: 887755 - DNA, 75 bp, synthetic construct
  source 1..75: mol_type = other DNA
acggcagaagggttgtataaaaccgatatgctaacagcgatggcagagcagaagatgctgagcgtggtggggaaa

SEQ ID NO: 887756 - DNA, 75 bp, synthetic construct
  source 1..75: mol_type = other DNA
gcaggacccggcaaccgacgcgggactgttgaaccagaacgacgtcaccacgcttatccgtaaagacggcttccg

SEQ ID NO: 887757 - DNA, 75 bp, synthetic construct
  source 1..75: mol_type = other DNA
tgcgcgttgttgaagtcaacgagggcacccgatctattaccacgatgagcaccgccatcgtgggcatggtctgca

SEQ ID NO: 887758 - DNA, 75 bp, synthetic construct
  source 1..75: mol_type = other DNA
aggttgaatgtcctcgttgccagacttgctccttattatactgatagtgtatcagctatagctgaagctgcttcc

SEQ ID NO: 887759 - DNA, 75 bp, synthetic construct
  source 1..75: mol_type = other DNA
tgtggcgatgggccgcgcgattgtgcgcgatccggcggtgttcctgtttgatgagccgctctctaacctcgatgc

SEQ ID NO: 887760 - DNA, 75 bp, synthetic construct
  source 1..75: mol_type = other DNA
ccggaggaacgacttttgcagaaataagtaaatcagcttttaaaacaattaaattacttattccttcttcggata

SEQ ID NO: 887761 - DNA, 75 bp, synthetic construct
  source 1..75: mol_type = other DNA
tgcctttaatccctccggtttttgtgttgatgatgccgcgctctatttttcttttgaggaaaaatgccgtgacct

SEQ ID NO: 887762 - DNA, 75 bp, synthetic construct
  source 1..75: mol_type = other DNA
gacgaagataagctcggcaaaggcaaggaaatgattgaccgcctgagcaagcttgtcggtatctttgaagggtta

SEQ ID NO: 887763 - DNA, 75 bp, synthetic construct
  source 1..75: mol_type = other DNA
tgacccaaaacggcgtcccgatgagccgttaccgtgccgggcgtctgatgaaatatctgaacctgagcagttgtc

SEQ ID NO: 887764 - DNA, 75 bp, synthetic construct
  source 1..75: mol_type = other DNA
cgacaccctgctcccgaaactcatctccggcgagctaaccctggaagatcttccggatctcaacaccgaaacaga

SEQ ID NO: 887765 - DNA, 75 bp, synthetic construct
  source 1..75: mol_type = other DNA
tttcccaagtgaatttgaagaaacagaagtaggatacttacctgctaaatggatatattctggtttaagcaaatt

SEQ ID NO: 887766 - DNA, 75 bp, synthetic construct
  source 1..75: mol_type = other DNA
cccggggaccggcgggcgagaagggggacacaggtccacagggtgccacagggccacagggaccagccggggcaa

SEQ ID NO: 887767 - DNA, 75 bp, synthetic construct
  source 1..75: mol_type = other DNA
tgaaaacgacatcactctacgtcacccacgatcaggttgaagcgatgaccctcgcccagcgagtgatggtaatga

SEQ ID NO: 887768 - DNA, 75 bp, synthetic construct
  source 1..75: mol_type = other DNA
cgactggcgcatcaggagcgcccgacggcaggcagcacgctgtggctgcatctgccggaaaatcagctgcatctt

SEQ ID NO: 887769 - DNA, 75 bp, synthetic construct
  source 1..75: mol_type = other DNA
gctcacccgcggcatgtgcgtcgagctggcgcgccacaatattcaggtcaacggtattgcgccgggctatttcaa

SEQ ID NO: 887770 - DNA, 75 bp, synthetic construct
  source 1..75: mol_type = other DNA
taaagccattaaaaaaattagagagaatatagactcaggtgttgcagaaaaattcactcctaatgtgattagaat

SEQ ID NO: 887771 - DNA, 75 bp, synthetic construct
  source 1..75: mol_type = other DNA
gaaggatggtgaaatgtacaaggattttaaggcccggccgggcagtctcctgagtggtgtgacagcacatcctga

SEQ ID NO: 887772 - DNA, 75 bp, synthetic construct
  source 1..75: mol_type = other DNA
ctttccggaacgtttcgcaaggcgaatccgcaattagaacattgtgcgattcgcattaacccgaatcgcagcggt

SEQ ID NO: 887773 - DNA, 75 bp, synthetic construct
  source 1..75: mol_type = other DNA
tcttctggtgcatgacgcgccggtttatccaacgacgcgcgtcattattgagcagatggggctaacgctcattac

SEQ ID NO: 887774 - DNA, 75 bp, synthetic construct
  source 1..75: mol_type = other DNA
tgacgcttattgaggcgcagcaaaagcagtttgcgctggtggacacgatttgccgtcattttcctggcagcgagt

SEQ ID NO: 887775 - DNA, 75 bp, synthetic construct
  source 1..75: mol_type = other DNA
atcaccacaacggtttatcctgcctgcaggtgggagtcatgttattcgtttattatcggatggcattccatcaac

SEQ ID NO: 887776 - DNA, 75 bp, synthetic construct
  source 1..75: mol_type = other DNA
aagttattagggtgtttgcaggatgcattttattactatttatggggtgtcactcttcatgggctggtattcagg

SEQ ID NO: 887777 - DNA, 75 bp, synthetic construct
  source 1..75: mol_type = other DNA
cagatccagggctctcaggcgcaggaagtcttgcgtgggctggttttcgcgccggtgatgcatgcggtacaggcg

SEQ ID NO: 887778 - DNA, 75 bp, synthetic construct
  source 1..75: mol_type = other DNA
cttaagcaggtcgtagacgagcaacaacctgatgcggcgctggtgcagcatacgcgccagcagccgcaggatcgc

SEQ ID NO: 887779 - DNA, 75 bp, synthetic construct
  source 1..75: mol_type = other DNA
aacgccggggctgaatcagcctcgcattacccagcgtgtggagcaggtgctggcagatgcgtttcatgcgccagc

SEQ ID NO: 887780 - DNA, 75 bp, synthetic construct
  source 1..75: mol_type = other DNA
ggcggcgctggtacagggcgcgggtactggcgcgattcgtgcggcactggcggctttgctcaaaccggggcaacg

SEQ ID NO: 887781 - DNA, 75 bp, synthetic construct
  source 1..75: mol_type = other DNA
gccggtgatgcatgcggtgcaggcgggagtatctgaacggttgctggctttgcttaacggcggcgcggtggcgga

SEQ ID NO: 887782 - DNA, 75 bp, synthetic construct
  source 1..75: mol_type = other DNA
aatgcggcgcgaatgtttcgacattctcctgtttcaagctgtttggaccagagggtgttggcgcagtggtaggtg

SEQ ID NO: 887783 - DNA, 75 bp, synthetic construct
  source 1..75: mol_type = other DNA
gaaaaaacatctcgtcgtcttggtgatgccaaaccggcaggcgaacaacaacgccgtcgccgtccgcgtaaacct

SEQ ID NO: 887784 - DNA, 75 bp, synthetic construct
  source 1..75: mol_type = other DNA
atatcgaagagttgccgcacgtcgtcaactatgaactgccaaacgtaccggaagattatgtccaccgtatcgggc

SEQ ID NO: 887785 - DNA, 75 bp, synthetic construct
  source 1..75: mol_type = other DNA
cgcagcgactgattgagcggatggaagcgctggcgaaagaagaaaatgtcaacatccaaaaaatagctgaatgtg

SEQ ID NO: 887786 - DNA, 75 bp, synthetic construct
  source 1..75: mol_type = other DNA
tggcggtgatgggggctggaaacgaaaaacgcttgagattttgctctgtggtgccctgacgctgacctttgcatc

SEQ ID NO: 887787 - DNA, 75 bp, synthetic construct
  source 1..75: mol_type = other DNA
tcaatcatgcaatagaactgatgaggagacggattcctgaaactccggccaccgacgctttcctggctgaagtac

SEQ ID NO: 887788 - DNA, 75 bp, synthetic construct
  source 1..75: mol_type = other DNA
aaccacgccgtggggaaggtggcgcaaaatctgcaagcgcgaaacctgcagaaaaaccgtctcgccgcctcggcg

SEQ ID NO: 887789 - DNA, 75 bp, synthetic construct
  source 1..75: mol_type = other DNA
gtggtaaggaacaaaatggaaaatggaaaatagatgctcgatttaataaggttgatttagtaaaccgtattaagg

SEQ ID NO: 887790 - DNA, 75 bp, synthetic construct
  source 1..75: mol_type = other DNA
gcgatgtcagtttcggacccgtcagttatgcgagcgaatctacgtttggcatgggagccgcagcagtcaacgcag

SEQ ID NO: 887791 - DNA, 75 bp, synthetic construct
  source 1..75: mol_type = other DNA
agtgaaaagcgcggtgattgccaatgcacagtcgaaggtgttgattgtcgagtttcatcagccgattgccgccag

SEQ ID NO: 887792 - DNA, 75 bp, synthetic construct
  source 1..75: mol_type = other DNA
acaacattgatgcgcctgtcactcagtgttagtacaaccagacttattctgttgcatcacgatgcgggtgacatc

SEQ ID NO: 887793 - DNA, 75 bp, synthetic construct
  source 1..75: mol_type = other DNA
tgcaacctggccgacagagtgccgtggtgtcggttttaccgaagcgccgcgtggggcgttaggccactgggccgc

SEQ ID NO: 887794 - DNA, 75 bp, synthetic construct
  source 1..75: mol_type = other DNA
cacgcctggtatcggtatcccaacgatcaggttgggcgtcatccttttgatggtattaccgacccgtggtacaac

SEQ ID NO: 887795 - DNA, 75 bp, synthetic construct
  source 1..75: mol_type = other DNA
cgcagtgggccgcaggcaagttgcaatatttctttgacaagctgatgaccaatctcaaaaacggcaatctcgcca

SEQ ID NO: 887796 - DNA, 75 bp, synthetic construct
  source 1..75: mol_type = other DNA
aatcgcttatcacaaaggcgatgctgcgaccgttgagtcggtcgatcgcatgatgtcggcgttgaacctgccgct

SEQ ID NO: 887797 - DNA, 75 bp, synthetic construct
  source 1..75: mol_type = other DNA
atgacgggatcatactttttattaccgatggcaatgggggccgtgcttggttgggtcagttacaatgtagtcgct

SEQ ID NO: 887798 - DNA, 75 bp, synthetic construct
  source 1..75: mol_type = other DNA
ggtgcacgaattttgtgttcagcggtaaaaccggcaccgggaaaaatcaccttgcagcggcgatgggtaaccggc

SEQ ID NO: 887799 - DNA, 75 bp, synthetic construct
  source 1..75: mol_type = other DNA
ttgccagcgatgttcccgacgcatattcgttatagcgcgctggcggcagcgtttaatatttcggtgttgattgcc

SEQ ID NO: 887800 - DNA, 75 bp, synthetic construct
  source 1..75: mol_type = other DNA
ggctggtcgaaagctcgcagaatctgatgatgcctgcctattacctgatggtagtggcggtgattggtttaatca

SEQ ID NO: 887801 - DNA, 75 bp, synthetic construct
  source 1..75: mol_type = other DNA
attactcaacgtgtggaacaggtactggcgggtgtgtttcatgcgcaagcggcggcgctggtgcaaggcgctggc

SEQ ID NO: 887802 - DNA, 75 bp, synthetic construct
  source 1..75: mol_type = other DNA
gccagtgatgcacgcggtgcaggcgggggtatctgaacggttgctggctttacttaacggtggcgcagtggcgga

SEQ ID NO: 887803 - DNA, 75 bp, synthetic construct
  source 1..75: mol_type = other DNA
tcttctggtgcatgacgcgcctgtttacccgacgactcaggtcattattgagcagatggggctgacgcttattac

SEQ ID NO: 887804 - DNA, 75 bp, synthetic construct
  source 1..75: mol_type = other DNA
taagcggcacgaacaaccagcgttgtgtgaatcatgtttctgaaccggataccgaaattccgccaggcttcaggg

SEQ ID NO: 887805 - DNA, 75 bp, synthetic construct
  source 1..75: mol_type = other DNA
ctaacgctattaacagtctgggaatgctaacaccgcttcaatatttttgcgtttttaatgctaataccggagagg

SEQ ID NO: 887806 - DNA, 75 bp, synthetic construct
  source 1..75: mol_type = other DNA
aagcgataaacaatttaggtatattaactccactacaatacttttgtattttcaacgccgacaccggagaaatta

SEQ ID NO: 887807 - DNA, 75 bp, synthetic construct
  source 1..75: mol_type = other DNA
gcaggatggcccgaaagtctcgtttaaagagattgccaccaaacactggcgcagcctgttgacatgtattggtct

SEQ ID NO: 887808 - DNA, 75 bp, synthetic construct
  source 1..75: mol_type = other DNA
cgtattccgttctttattgctctgccgttagggattatcgggctttacctgcgccatgcgctggaagaaactccg

SEQ ID NO: 887809 - DNA, 75 bp, synthetic construct
  source 1..75: mol_type = other DNA
ggaccggaattttgagaacccctggttgctcccggtaagcggcacgaacaaccagcgttgtgtgaatcatatttc

SEQ ID NO: 887810 - DNA, 75 bp, synthetic construct
  source 1..75: mol_type = other DNA
caaatccgcagtgggaaccgtggttaagagtcggtcatcagtcagagagtcgttattacgacggggatttgaatg

SEQ ID NO: 887811 - DNA, 75 bp, synthetic construct
  source 1..75: mol_type = other DNA
aaaaaacgctgatggcggtagcgtgtctgagcgcagtacctgcagcccaggctgctgtctccctggaccgtacgc

SEQ ID NO: 887812 - DNA, 75 bp, synthetic construct
  source 1..75: mol_type = other DNA
ccgtattacgtgacggtgattggccttggcggcagtgaaaaacaggcgaaggaaggtgagtttgaggccgtgatg

SEQ ID NO: 887813 - DNA, 75 bp, synthetic construct
  source 1..75: mol_type = other DNA
caaaaccgtatgctgagaaaatgttgcagatccaacaagatcagcagactccctggcattttcacacccacaaaa

SEQ ID NO: 887814 - DNA, 75 bp, synthetic construct
  source 1..75: mol_type = other DNA
ccgggaggacgttttccggcgatagaagaagatgaaccggtgaaatggttattgtgcagtgagtatggaattttg

SEQ ID NO: 887815 - DNA, 75 bp, synthetic construct
  source 1..75: mol_type = other DNA
tgggcggcttctggatgcgtgagcttggtctgtatgacgatgccggaacactgattgcggtatccaacatggctg

SEQ ID NO: 887816 - DNA, 75 bp, synthetic construct
  source 1..75: mol_type = other DNA
cctgatggccagcatcttccagtattgcggtgaaacgtaccaggaccggaaaatcatcacggttgaagatcccat

SEQ ID NO: 887817 - DNA, 75 bp, synthetic construct
  source 1..75: mol_type = other DNA
ggcgcaaggctgtccgtgaatatctcgtcattgataacagcctgcgccgcaaactctatgacgttgattacagca

SEQ ID NO: 887818 - DNA, 75 bp, synthetic construct
  source 1..75: mol_type = other DNA
aaacgcgtgcaaaatatgtattagaagagatggaaaagctttttccggatagtagctcagagttgaggaactggg

SEQ ID NO: 887819 - DNA, 75 bp, synthetic construct
  source 1..75: mol_type = other DNA
attgtggtcacgccgccggtgcagcgtcttgagccgggagccagaagtatggtccgtctgaccagcaccccggat

SEQ ID NO: 887820 - DNA, 75 bp, synthetic construct
  source 1..75: mol_type = other DNA
ctgagctatatcaatgactatggtggacgtccggttctgcagttcagttgcagtggtgaccgttgtacggcagta

SEQ ID NO: 887821 - DNA, 75 bp, synthetic construct
  source 1..75: mol_type = other DNA
cgtccggcaggcattaaagcagaacccaatgccgtatggcaggatcaattgatactgaacaaaaccagtggcgga

SEQ ID NO: 887822 - DNA, 75 bp, synthetic construct
  source 1..75: mol_type = other DNA
ccaacacgataactattttcttgagccgggaggacgttttccggcgatagaagaagatgaaccggtgaaatggtt

SEQ ID NO: 887823 - DNA, 75 bp, synthetic construct
  source 1..75: mol_type = other DNA
gaaaggtgaaaaatcgacgcttgtaacgctgtttaaaccgttccagaaggaggcaacggataacagcggccagcc

SEQ ID NO: 887824 - DNA, 75 bp, synthetic construct
  source 1..75: mol_type = other DNA
tgggagattatcgcattctgtgtgagatccgggatgacgagctggttatccttgccgccaccattggccatcgcc

SEQ ID NO: 887825 - DNA, 75 bp, synthetic construct
  source 1..75: mol_type = other DNA
acttttcatcatgcctacgctgtcaacgtatctcatcccggcgcttaaaccctggcgttccatcggaaatctgat

SEQ ID NO: 887826 - DNA, 75 bp, synthetic construct
  source 1..75: mol_type = other DNA
gaacgcttaccacggggccgttactttgtaggcaaaaaaccaggtcgcccatttcaaatcatcgacgaggttctt

SEQ ID NO: 887827 - DNA, 75 bp, synthetic construct
  source 1..75: mol_type = other DNA
atgccagcggcgtgaaggtgaccagtgcggcgcagaaccgggcgtattacagtccgtcacaggaccggattgtga

SEQ ID NO: 887828 - DNA, 75 bp, synthetic construct
  source 1..75: mol_type = other DNA
gtacctgtgatacatcgttatcaggaccgtgcatattaccgcccgggagttgaccacattatgatgccggaagcc

SEQ ID NO: 887829 - DNA, 75 bp, synthetic construct
  source 1..75: mol_type = other DNA
ggcttgataacatgaccaatattcccgacggtatggactggggcgtcattgatggcaacctgataaacatctcag

SEQ ID NO: 887830 - DNA, 75 bp, synthetic construct
  source 1..75: mol_type = other DNA
tctttaccggcagctcatggagcgaatggcgggaagtctacacctcgtattcacttcccctgaatctgggtatcg

SEQ ID NO: 887831 - DNA, 75 bp, synthetic construct
  source 1..75: mol_type = other DNA
tcggtggtgtttatggcggcgactctgtcggtggaaaacagcgtgtacaggcttcaggaaacaatcaggtgtcca

SEQ ID NO: 887832 - DNA, 75 bp, synthetic construct
  source 1..75: mol_type = other DNA
tactagcctgacgtttatgaaaaacaatggcgaaatgccggttgatgccgacctgaatacatttggtcccgttaa

SEQ ID NO: 887833 - DNA, 75 bp, synthetic construct
  source 1..75: mol_type = other DNA
aaatccgggaagccgcacgatcacgacaagacgtgtgccaattatcgacgaagctcagacatggatggcgaaaca

SEQ ID NO: 887834 - DNA, 75 bp, synthetic construct
  source 1..75: mol_type = other DNA
cgacggtatggactggggcgtcattgatggcaacctgataaacatctcagtcggtccgagtgatgattctggttc

SEQ ID NO: 887835 - DNA, 75 bp, synthetic construct
  source 1..75: mol_type = other DNA
aagagaatcttggagtttcaccatttttggatcacaagagtatgaacctcgacctgcttatctggtacagcaatg

SEQ ID NO: 887836 - DNA, 75 bp, synthetic construct
  source 1..75: mol_type = other DNA
aataacacgctggtaattggcggtggttcatctgtgttcaggtcagcgacagtgattgattttgcaacgaatcag

SEQ ID NO: 887837 - DNA, 75 bp, synthetic construct
  source 1..75: mol_type = other DNA
ggtggttgaacagtcagcgccggaagtgggaggcctgatcacccgcacagtatttgcggtgtatgattttcagtt

SEQ ID NO: 887838 - DNA, 75 bp, synthetic construct
  source 1..75: mol_type = other DNA
cctgtcatcagcgcggttatggttcgcggggttgtccctcatgctcgccagtcctgtgcgggggtggaagaaaca

SEQ ID NO: 887839 - DNA, 75 bp, synthetic construct
  source 1..75: mol_type = other DNA
caacttgcctggtacagcaaagaattagagaagtctattgcccggcttgaaaacgaaaaagccgctatccaagcc

SEQ ID NO: 887840 - DNA, 75 bp, synthetic construct
  source 1..75: mol_type = other DNA
acctggcccaactcgcctggtacagcaaagaattggagatgtctattgcccggcttgaaaacgaaaaagccgcta

SEQ ID NO: 887841 - DNA, 75 bp, synthetic construct
  source 1..75: mol_type = other DNA
tttcgtcggacagggacattcacattaccgttgcatgattccggatatatcacggaaagcacagacagctatgca

SEQ ID NO: 887842 - DNA, 75 bp, synthetic construct
  source 1..75: mol_type = other DNA
cagcgaaggccttgtggtgacaacggattacggtggattacgtttgttcatgtcaggagaaaatggattactgaa

SEQ ID NO: 887843 - DNA, 75 bp, synthetic construct
  source 1..75: mol_type = other DNA
atgccccataatccaaacacatggccggattggctggagattttccagagctggtggcgtggagatacgcctctt

SEQ ID NO: 887844 - DNA, 75 bp, synthetic construct
  source 1..75: mol_type = other DNA
atacaccggatcaattgtttcatgatggtgaccccactcaggggatagaaggaaccatcgtaactgctgattatt

SEQ ID NO: 887845 - DNA, 75 bp, synthetic construct
  source 1..75: mol_type = other DNA
ggaggctggtgaaataatgtctgtaaggaatgatgagctgcattatttcatgctggcatcgctgtctggccagtg

SEQ ID NO: 887846 - DNA, 75 bp, synthetic construct
  source 1..75: mol_type = other DNA
aggtaaaaatcaggataaaatactggtagttgaccaacaggcatcagaggggaataacacgctggtaattggcgg

SEQ ID NO: 887847 - DNA, 75 bp, synthetic construct
  source 1..75: mol_type = other DNA
gtcaggctgacgggtcctcccggtggggtggcctgccacggggcgggagcgtcgcggaaaaaggctagtttttga

SEQ ID NO: 887848 - DNA, 75 bp, synthetic construct
  source 1..75: mol_type = other DNA
cacgtgaagaccgggaatttatcgaagccagtgtcgggaaaatgactgttgaagaaatggcgaaaaaactgaatg

SEQ ID NO: 887849 - DNA, 75 bp, synthetic construct
  source 1..75: mol_type = other DNA
cacgcgaagaccgggaatttatcgaagccagtgtcgggaaaatgaccgtcgaggaaatggcgaaaaaactgaacg

SEQ ID NO: 887850 - DNA, 75 bp, synthetic construct
  source 1..75: mol_type = other DNA
gaacaactggtggcgctgcataccctgcagggcgaactggaacgcctgcaatatcgtatccgcgaaggtgcgccg

SEQ ID NO: 887851 - DNA, 75 bp, synthetic construct
  source 1..75: mol_type = other DNA
ccaggggctgcgggatttactggctcaaccgttattgctgaatttgaatcgctggaagcagctcaggcctgggcc

SEQ ID NO: 887852 - DNA, 75 bp, synthetic construct
  source 1..75: mol_type = other DNA
acaaatatttatgtcgtgaactttataaagaagggctggatattcatgtcattgcccgaaagatggaattaagca

SEQ ID NO: 887853 - DNA, 75 bp, synthetic construct
  source 1..75: mol_type = other DNA
gaggaaatggcgaaaaaactgaacgttgccccaaccgccctacaggcacatgccagaaggcacggaatatcgttg

SEQ ID NO: 887854 - DNA, 75 bp, synthetic construct
  source 1..75: mol_type = other DNA
agggaagccatcgagcaggtggtgacggcgcggcgcgaggaaatcgactgggtactcagcgaccgccagcaggat

SEQ ID NO: 887855 - DNA, 75 bp, synthetic construct
  source 1..75: mol_type = other DNA
actgctgaccttctggatggcgaacctgccggaacacccgcagtggaaaacctcaccgccaccggaactgaccgg

SEQ ID NO: 887856 - DNA, 75 bp, synthetic construct
  source 1..75: mol_type = other DNA
ctctaccagaacgtgctgcaacaggtgtcccgcaactacgccgatatgacgctggcggacatgaccggggatacc

SEQ ID NO: 887857 - DNA, 75 bp, synthetic construct
  source 1..75: mol_type = other DNA
tacctgcgcgatgacggacgcatcaaccagtttatcgccgccaacctttccggtgttctgaaacgtgaaggccgc

SEQ ID NO: 887858 - DNA, 75 bp, synthetic construct
  source 1..75: mol_type = other DNA
ctgcgtctggcccatacccttgcagagcggggtatcgctcactggcagaccgtcctgaaaccgctgctggcaggc

SEQ ID NO: 887859 - DNA, 75 bp, synthetic construct
  source 1..75: mol_type = other DNA
ctgcgggcaaaaccggcgcgtgacgtgatgaaaacgcatctggtgattgacgggcaggagctggaatatttcaac

SEQ ID NO: 887860 - DNA, 75 bp, synthetic construct
  source 1..75: mol_type = other DNA
gcttagcctgggatatggcaaaagtcgggcgtttggctgtggactgatgctgatcaaacccggagcagaggcgtg

SEQ ID NO: 887861 - DNA, 75 bp, synthetic construct
  source 1..75: mol_type = other DNA
gtaccggacaacaactttgtttcaacctgcgggcgaatccaacaatctgtaaagcgggcaagcgccacgatctgc

SEQ ID NO: 887862 - DNA, 75 bp, synthetic construct
  source 1..75: mol_type = other DNA
ggagcgcgaaaaactggtattaaccctctattatcaggaagagctgaatctcaaagagattggcgcggtgctgga

SEQ ID NO: 887863 - DNA, 75 bp, synthetic construct
  source 1..75: mol_type = other DNA
tatccttgctattggcgcacatcctgacgatatagaattaggctgtggcgcatcgcttgctcgtcttgcgcaaaa

SEQ ID NO: 887864 - DNA, 75 bp, synthetic construct
  source 1..75: mol_type = other DNA
tgcattcttccgcgaaaaagaggaaaggtatccttgcgattggcgcacatcctgacgatatagaattaggttgtg

SEQ ID NO: 887865 - DNA, 75 bp, synthetic construct
  source 1..75: mol_type = other DNA
tctgagccaggggtatggcaaaagccgggcgttcggctgtggtctgatgctgatcaaacccggagcagaggcgtg

SEQ ID NO: 887866 - DNA, 75 bp, synthetic construct
  source 1..75: mol_type = other DNA
ggtggtaaggcaacagatgtcaccatgacatccggtagtgccctgattgcagacagtggtgccactgttgagggg

SEQ ID NO: 887867 - DNA, 75 bp, synthetic construct
  source 1..75: mol_type = other DNA
taagtctgctgatgcacagaagcctactatgcaggatctgattaaagcaaaagcagaacaaatcaaacaatccaa

SEQ ID NO: 887868 - DNA, 75 bp, synthetic construct
  source 1..75: mol_type = other DNA
atttatgcaaaagaagcactgcaaaaactgggcgcatgggatacgctctctccgaaactggctccggcggaagat

SEQ ID NO: 887869 - DNA, 75 bp, synthetic construct
  source 1..75: mol_type = other DNA
aaagagattggtgcggtgctggaggtcggggaatcgcgggtcagtcagttacacagccaggctattaaacggtta

SEQ ID NO: 887870 - DNA, 75 bp, synthetic construct
  source 1..75: mol_type = other DNA
ctattatcaggaagagctgaatctcaaagagattggtgcggtgctggaggtcggggaatcgcgggtcagtcagtt

SEQ ID NO: 887871 - DNA, 75 bp, synthetic construct
  source 1..75: mol_type = other DNA
tatccacacactatcccagccacaagggggtgattatgacgatagcggaacaactggaagagaaaggccttgaga

SEQ ID NO: 887872 - DNA, 75 bp, synthetic construct
  source 1..75: mol_type = other DNA
cctgacgatatagaattaggttgtggtgcatcgcttgctcgtctttcgcagaaaggaatttatatcactgctgtt

SEQ ID NO: 887873 - DNA, 75 bp, synthetic construct
  source 1..75: mol_type = other DNA
ttccaccgttcaccatccatgagatgcgacatacctttgcgacaaagctcattgagagcggggccgacattcaca

SEQ ID NO: 887874 - DNA, 75 bp, synthetic construct
  source 1..75: mol_type = other DNA
atggccaccaaacatataaatgatgagctctggaatcgcattgaggcgctgaccgtcaaagcgaacaccatgcat

SEQ ID NO: 887875 - DNA, 75 bp, synthetic construct
  source 1..75: mol_type = other DNA
tgacctgatgtgcgaatccctgctgggttataaggggcagcgggcataccgggcaggtgaaaacgaacagggaga

SEQ ID NO: 887876 - DNA, 75 bp, synthetic construct
  source 1..75: mol_type = other DNA
tccggcgctttatatcaaagcgctgcctgaagtaacgtcagatcgccgcgccatggatgactcccagcttcagcg

SEQ ID NO: 887877 - DNA, 75 bp, synthetic construct
  source 1..75: mol_type = other DNA
tgagacttatggtgagcgttttcttactcacagtaaaatgacgtttaatgagcttgtggatgagtatgagaaaag

SEQ ID NO: 887878 - DNA, 75 bp, synthetic construct
  source 1..75: mol_type = other DNA
aaaccagcgttgacgttgatgattgctgtgttgaaccaatggcccgacatcgcagcccaaagaatcaaagagagg

SEQ ID NO: 887879 - DNA, 75 bp, synthetic construct
  source 1..75: mol_type = other DNA
cgttcagaaacagcgtggatgggtgccagacggcgcgatccacgcgatcgctgacgttctgggtattcccgcaag

SEQ ID NO: 887880 - DNA, 75 bp, synthetic construct
  source 1..75: mol_type = other DNA
tggggaactgtgataaagggccaaacatgatgatcgatgaggacactcacgcgcatctgaccccggaagcgatcc

SEQ ID NO: 887881 - DNA, 75 bp, synthetic construct
  source 1..75: mol_type = other DNA
ctgacgttctgggtattccggcaagcgatgttgaaggtgtggcaacgttctacagccagatcttccgccagccgg

SEQ ID NO: 887882 - DNA, 75 bp, synthetic construct
  source 1..75: mol_type = other DNA
atcacataaaatgcagtgaattcaaccggctgctggtcccgtttatcggtgaattactggcagggacgcgcggat

SEQ ID NO: 887883 - DNA, 75 bp, synthetic construct
  source 1..75: mol_type = other DNA
cagggagcatcagttacgagcgatgccgatgcggtgatctcctggttggctgcaaacctcgaaggtggaaggaga

SEQ ID NO: 887884 - DNA, 75 bp, synthetic construct
  source 1..75: mol_type = other DNA
tacagccagatcttccgtcagccagtaggccgccatgtgatccgttattgcgacagcgtggtctgtcacatcaac

SEQ ID NO: 887885 - DNA, 75 bp, synthetic construct
  source 1..75: mol_type = other DNA
cagaagcctactatgcaggatctgattaaagcaaaagcagaacaaatcaaacaatccaaaaaaggaaactattaa

SEQ ID NO: 887886 - DNA, 75 bp, synthetic construct
  source 1..75: mol_type = other DNA
aaatatttcccggccatgatgctggttgacccgaaacagggcagtgttcgcccgttatcatacggctttatttcg

SEQ ID NO: 887887 - DNA, 75 bp, synthetic construct
  source 1..75: mol_type = other DNA
aaaccggagcaaaaggcgcagccttaaaacatgctgattacatttccagatccggcgaatataagagctacaaat

SEQ ID NO: 887888 - DNA, 75 bp, synthetic construct
  source 1..75: mol_type = other DNA
tgaagatgaccagataggtcagtacagcattaccgccgaacgctatggccgtatgactgctgtgttcccggacaa

SEQ ID NO: 887889 - DNA, 75 bp, synthetic construct
  source 1..75: mol_type = other DNA
caaccgtgcagcagtgggtaagccaggcaggcgcgcaggattgtgttctggcactggaaaacgaatctaacccgc

SEQ ID NO: 887890 - DNA, 75 bp, synthetic construct
  source 1..75: mol_type = other DNA
tgacggtactggcaacgttgctggtctgaatatctctgtcgcaacgggtgttctgcttggcgaatggtggcgtca

SEQ ID NO: 887891 - DNA, 75 bp, synthetic construct
  source 1..75: mol_type = other DNA
cagcgaacaccagagggggcagcctgggcaccacgaaaaagaccggataaagcccgcggcaagtataaaaacaaa

SEQ ID NO: 887892 - DNA, 75 bp, synthetic construct
  source 1..75: mol_type = other DNA
tatgccccggaatgctaccggatattcagtccactaagggtgacggtgagggcgagtcattatcctgggttggca

SEQ ID NO: 887893 - DNA, 75 bp, synthetic construct
  source 1..75: mol_type = other DNA
gaaatcgatcagtgcttcaggtcataaatttggtctggctccgctcggctgcggctgggttatctggcgtgatga

SEQ ID NO: 887894 - DNA, 75 bp, synthetic construct
  source 1..75: mol_type = other DNA
atggataagaagcaagtaacggatttaaggtcggaactactcgattcacgttttggcgcgaagtccatttcaact

SEQ ID NO: 887895 - DNA, 75 bp, synthetic construct
  source 1..75: mol_type = other DNA
gcagaccgccgtcggttcccgtgcggcactgacagcggagaactacgagaaggccagcaatctgctgctgggtat

SEQ ID NO: 887896 - DNA, 75 bp, synthetic construct
  source 1..75: mol_type = other DNA
tttagaaatgcaggaagaggtgaaactatatactaaacttcctaactggtttaaaatcccgacccctttggggaa

SEQ ID NO: 887897 - DNA, 75 bp, synthetic construct
  source 1..75: mol_type = other DNA
ggtattatcgaaaaagatgcattcgcccatctgatcttctctgattcctcacaaggtgtaggaatcaccggttcg

SEQ ID NO: 887898 - DNA, 75 bp, synthetic construct
  source 1..75: mol_type = other DNA
ttaacgtgctggatgatttccgtcaggcgggttacaccgtagtgacaacttccagcgagcagggtaaaccgctgt

SEQ ID NO: 887899 - DNA, 75 bp, synthetic construct
  source 1..75: mol_type = other DNA
tgcaggcattcatggacatggcaaaagccgagaggaaagaagagcgccggcgtaagcgagcggaagcaaaagcaa

SEQ ID NO: 887900 - DNA, 75 bp, synthetic construct
  source 1..75: mol_type = other DNA
acttcattaccgggaaagggtcaatggggatggcgatgcgcgccaaaacgccaatctttgatgacgatggaaaag

SEQ ID NO: 887901 - DNA, 75 bp, synthetic construct
  source 1..75: mol_type = other DNA
ggggatggcgatgcgcgccaaaacgccaatctttgatgacgatggaaaagtcggtaatgctgccaacttactgat

SEQ ID NO: 887902 - DNA, 75 bp, synthetic construct
  source 1..75: mol_type = other DNA
tcattgcatggtctacgggcgtcgatgccaaaacggcaattggtcttggcctgccgtttagtttgttaatgcagt

SEQ ID NO: 887903 - DNA, 75 bp, synthetic construct
  source 1..75: mol_type = other DNA
gtacctacctggcgcaaggcgcgatgcaggcgctggtaaaggcgatgccagcctggttgactcatggttttgaag

SEQ ID NO: 887904 - DNA, 75 bp, synthetic construct
  source 1..75: mol_type = other DNA
gcgtatgcggtgattgctttcctctgtacttacctggcacaaggggcgatgcaggcgctggtgaaagcgatgccc

SEQ ID NO: 887905 - DNA, 75 bp, synthetic construct
  source 1..75: mol_type = other DNA
cctgccgtttcacagcgattgggtgctggagtgcacttccagccagaagcaagccgcggaagctatcacggcgct

SEQ ID NO: 887906 - DNA, 75 bp, synthetic construct
  source 1..75: mol_type = other DNA
catgatgcaaaaaatcacccatgaagagacgcattcacgcaatcttattattcccgcccggctcattgcgccgaa

SEQ ID NO: 887907 - DNA, 75 bp, synthetic construct
  source 1..75: mol_type = other DNA
acctgggcaagtacacctgcgcgggaacttggtacaacacttgcagatcgcatgatgcaaaaaatcactcatgaa

SEQ ID NO: 887908 - DNA, 75 bp, synthetic construct
  source 1..75: mol_type = other DNA
atgtcacgagcgcataatccatacggagatggtttagcatctgttagaatatgtgatatattaactaaagtatta

SEQ ID NO: 887909 - DNA, 75 bp, synthetic construct
  source 1..75: mol_type = other DNA
tcgctaggcgtaccagtattggttacaagggaggtaacagaaaggccagaggctgttaaagcagggacggttaaa

SEQ ID NO: 887910 - DNA, 75 bp, synthetic construct
  source 1..75: mol_type = other DNA
ttcccgcccggctcattgcgcgaaataatcctctctttatctgctatacactggtagtgtcctttcctcaaggtt

SEQ ID NO: 887911 - DNA, 75 bp, synthetic construct
  source 1..75: mol_type = other DNA
gaaaaggtatttctcaatatattatcgcacagcgcgctgcacagggattatctacatctgctgctgctgccggtt

SEQ ID NO: 887912 - DNA, 75 bp, synthetic construct
  source 1..75: mol_type = other DNA
cagtgcgggatggagtgggtgctatgagtcttattccttttcactaagtgttcctgtatctggctggactactac

SEQ ID NO: 887913 - DNA, 75 bp, synthetic construct
  source 1..75: mol_type = other DNA
tcagggcgcattaacaatagatttggtgatctgaatgggacacttaatgttaataaaaacagaaaatcacatgat

SEQ ID NO: 887914 - DNA, 75 bp, synthetic construct
  source 1..75: mol_type = other DNA
atcgggcgatattcgtgtactggtggcaactgacatcgctgcgcgcggtctggatatcgaagagttgccgcacgt

SEQ ID NO: 887915 - DNA, 75 bp, synthetic construct
  source 1..75: mol_type = other DNA
gcatttttagaagataactttaaaatattatctcagtataataaagagtattctgttgaaagatcagtcctcatt

SEQ ID NO: 887916 - DNA, 75 bp, synthetic construct
  source 1..75: mol_type = other DNA
agacggggatgataaggtctttttagctgccggctcagccaatatctacgcaggaaaggggcatgatgttgttta

SEQ ID NO: 887917 - DNA, 75 bp, synthetic construct
  source 1..75: mol_type = other DNA
cattgtacggtgattattcgctagggagcaacgataatgcttttattcctgtaccagcattaactccagccagtt

SEQ ID NO: 887918 - DNA, 75 bp, synthetic construct
  source 1..75: mol_type = other DNA
gggtattcttacaactattccagaggaaactattcttctaacgaattatttgttgatggatatatgacatcaaca

SEQ ID NO: 887919 - DNA, 75 bp, synthetic construct
  source 1..75: mol_type = other DNA
gctggataacgcggcgttcgaagccgagcagatgggcaagtcgttgacggttaacttcccgcctgggccgtggcc

SEQ ID NO: 887920 - DNA, 75 bp, synthetic construct
  source 1..75: mol_type = other DNA
agcgagttgatgattgtggtaaagattacaatatgggctggagtggatgttatgagtcttattcagcgtctttaa

SEQ ID NO: 887921 - DNA, 75 bp, synthetic construct
  source 1..75: mol_type = other DNA
atcgcaaagtagtggcggaaactttaacttcgatctacttcctgtacctgatatttatggtatgagagccggaac

SEQ ID NO: 887922 - DNA, 75 bp, synthetic construct
  source 1..75: mol_type = other DNA
agtcttttcgtgatttatggggagagcaggacgaattactcgaagtcagactttatgggcaatctcttggcgttc

SEQ ID NO: 887923 - DNA, 75 bp, synthetic construct
  source 1..75: mol_type = other DNA
atggtgataaaggtaatgacacactgaggggcggaaacggggatgaccagctctatggcggtgatggtaacgata

SEQ ID NO: 887924 - DNA, 75 bp, synthetic construct
  source 1..75: mol_type = other DNA
aattctatgcgcaatatgagaaaattaagccttacttgttgaataatggacaaaatctaccagctcgtgagcatt

SEQ ID NO: 887925 - DNA, 75 bp, synthetic construct
  source 1..75: mol_type = other DNA
tcgaacatgcagaacctgcaccgtttgtcgcaggcagtgagccggacgtgcggatctcagcgatcagcgcggctt

SEQ ID NO: 887926 - DNA, 75 bp, synthetic construct
  source 1..75: mol_type = other DNA
taatctcgggttaatggcggcggaacgtgcaggaatgctgaaacgtcaggcgctgaagtatgcgttagggttgta

SEQ ID NO: 887927 - DNA, 75 bp, synthetic construct
  source 1..75: mol_type = other DNA
gtccgtctttctggtggaatcccgataagtttatcggcccggcaggcttgttagcggcatactcgtttcctgatc

SEQ ID NO: 887928 - DNA, 75 bp, synthetic construct
  source 1..75: mol_type = other DNA
ctatcaggcgagaataatttctgagctcggagataaagacgatgtggtttattctggagcaggctcatcagaagt

SEQ ID NO: 887929 - DNA, 75 bp, synthetic construct
  source 1..75: mol_type = other DNA
ctatcaggcgagaataatttctgagctcggagataaagacgatatagtttattctggagcaggctcatcagaagt

SEQ ID NO: 887930 - DNA, 75 bp, synthetic construct
  source 1..75: mol_type = other DNA
aaccagttttttggtgcagcagaaaaagttgtaggattaactgaacgtggtgttgcaatattcgcaccacaactt

SEQ ID NO: 887931 - DNA, 75 bp, synthetic construct
  source 1..75: mol_type = other DNA
aaattgccgttgcttggctatatggtggaaaacaccgtcctgcaacaggcgctgtggcaggcgctggaagcgcat

SEQ ID NO: 887932 - DNA, 75 bp, synthetic construct
  source 1..75: mol_type = other DNA
tgcgtggcttccatttccatcagatgtccttcctgctccgctactgaaggcgtggtgcgtaacggcaaaagcact

SEQ ID NO: 887933 - DNA, 75 bp, synthetic construct
  source 1..75: mol_type = other DNA
attccttgccgcaggcgccagttttaaccagatggtcaccgcactggagcgcatgatgacctcccagcagcgctt

SEQ ID NO: 887934 - DNA, 75 bp, synthetic construct
  source 1..75: mol_type = other DNA
cctgtgctttcttttcaggaagttgggaataatatcgagctgaaagtattaggaacggtaaatgatttcagagca

SEQ ID NO: 887935 - DNA, 75 bp, synthetic construct
  source 1..75: mol_type = other DNA
aacaagagaaaaaacacatcaagataaatgaaaaaataaatacattaattggaattattaatcaatctcttgcag

SEQ ID NO: 887936 - DNA, 75 bp, synthetic construct
  source 1..75: mol_type = other DNA
agtcgtacatattttctgcaataatctacattggcaaggataacttcaccagtaatgatgtagcaaaaattcttg

SEQ ID NO: 887937 - DNA, 75 bp, synthetic construct
  source 1..75: mol_type = other DNA
cgtgatgatgtgctggctgcgcaccgcgttccgccgcaactgatgggggcgatgccgggtgaaaaaagtgcgttt

SEQ ID NO: 887938 - DNA, 75 bp, synthetic construct
  source 1..75: mol_type = other DNA
gtggtcgcggggcgtttaaaaacctgtttcttcatgcgccgggtggtggcaaggatggtgtgcaaatactgccgt

SEQ ID NO: 887939 - DNA, 75 bp, synthetic construct
  source 1..75: mol_type = other DNA
tccagcagataaccgcaaaggatgaattcctgaacatcaaagggagtgcccgcgacgatatcctggcggcccatc

SEQ ID NO: 887940 - DNA, 75 bp, synthetic construct
  source 1..75: mol_type = other DNA
acagtctaagtcgtggatggaggccgccattcagatgcgcaatggtgagccagataacgcagcccttgccttact

SEQ ID NO: 887941 - DNA, 75 bp, synthetic construct
  source 1..75: mol_type = other DNA
taaacgcaaaggcaagattcatggcaaggattatgcagccatcaagaatatgacattcggtcaattgattgataa

SEQ ID NO: 887942 - DNA, 75 bp, synthetic construct
  source 1..75: mol_type = other DNA
gccttgctctgctcatgttccttgccctgacggggctgcgtctgggggaaacccgtcatcttcgtcttgaggatg

SEQ ID NO: 887943 - DNA, 75 bp, synthetic construct
  source 1..75: mol_type = other DNA
ggatgcaggtttggtctttaacccgtaccaaaatgggaaataccaccatttcaacggtcattgtccaccccgttg

SEQ ID NO: 887944 - DNA, 75 bp, synthetic construct
  source 1..75: mol_type = other DNA
ggcggagagagtgaggcagacttttagtgatgaggcactagagaaactggatttaaagttggcagagaacaagga

SEQ ID NO: 887945 - DNA, 75 bp, synthetic construct
  source 1..75: mol_type = other DNA
cgaatgagctgatttatagcactattgcacgggcaggcgtttatcaagggattgttagtcctaagcagctgttgg

SEQ ID NO: 887946 - DNA, 75 bp, synthetic construct
  source 1..75: mol_type = other DNA
tacgaactatttttgagacacttatcttttggtcaacaaaagaaaaagatgtggtcatcttatgtgaatatgttc

SEQ ID NO: 887947 - DNA, 75 bp, synthetic construct
  source 1..75: mol_type = other DNA
acgatccccccaacgatttaatgtggtggcgtcgcctgttccgtgccattgataaatgggcaccacctggtcagc

SEQ ID NO: 887948 - DNA, 75 bp, synthetic construct
  source 1..75: mol_type = other DNA
ggcagaggcactgcgccgccagccgtcgctaagcgctttctcgttcgatggcccttacgatgcgcacgcgctcga

SEQ ID NO: 887949 - DNA, 75 bp, synthetic construct
  source 1..75: mol_type = other DNA
actggcaaaatatacacgcaggggaagtgacctggatacctactggtatctcaacgacgacggtacggagttcag

SEQ ID NO: 887950 - DNA, 75 bp, synthetic construct
  source 1..75: mol_type = other DNA
ctgctgttgtggttggcctggagtctggcaaaaccggcgcgtaagctgaaaaacgctgccgatgaagttgcccag

SEQ ID NO: 887951 - DNA, 75 bp, synthetic construct
  source 1..75: mol_type = other DNA
agatgaccgagcttctggatagcgaacagcgtcaggggctgatgattgagcagcatgttgaagcggagctggcga

SEQ ID NO: 887952 - DNA, 75 bp, synthetic construct
  source 1..75: mol_type = other DNA
cgtattgaaaccgaagcgcaacgtctggacagcatgatcaacgatctgttggtgatgtcacgtaatcagcaaaaa

SEQ ID NO: 887953 - DNA, 75 bp, synthetic construct
  source 1..75: mol_type = other DNA
gctgatgggcggcctgtttcttatctggaaagccagtaaggagatccacgagtccatcgaaggcgaagaagaagg

SEQ ID NO: 887954 - DNA, 75 bp, synthetic construct
  source 1..75: mol_type = other DNA
gggatcgacaatattattttcctttctctggtggtggcaaagctccccacagcacaacgtgctcatgcgcgccgt

SEQ ID NO: 887955 - DNA, 75 bp, synthetic construct
  source 1..75: mol_type = other DNA
cagccgtggtgattgccgtaggcgtgatgatgttcgccgcgcgctcgattggtgattttgtcgaacgccatcctt

SEQ ID NO: 887956 - DNA, 75 bp, synthetic construct
  source 1..75: mol_type = other DNA
gatctgctggacgcacaccgcatcccctttcagttgatgggcggcaagccggagaacgtcgggtcactgggggat

SEQ ID NO: 887957 - DNA, 75 bp, synthetic construct
  source 1..75: mol_type = other DNA
ctttgtcccgcacaaacttctttcccgccaggtgttctccgccttcgcgctggactggtttgtcttcgggaatgg

SEQ ID NO: 887958 - DNA, 75 bp, synthetic construct
  source 1..75: mol_type = other DNA
ggcctgcccggctatctttctgccatcccatccgctttgctcaacgagtccgccacgctgttccgccgtaagtat

SEQ ID NO: 887959 - DNA, 75 bp, synthetic construct
  source 1..75: mol_type = other DNA
atgcataacgtgtcactgatggaagaaacactgcggaaaatgaggaaacatggtagccaaaccgtcgaggtaaca

SEQ ID NO: 887960 - DNA, 75 bp, synthetic construct
  source 1..75: mol_type = other DNA
attgtcgttgtagcccagttgtcgccggaattcaccgctcgtcttgttgaccgttggcgagagcttgaagaagct

SEQ ID NO: 887961 - DNA, 75 bp, synthetic construct
  source 1..75: mol_type = other DNA
gacaatgtgaaacgaaccatcgaaacgctggctaaaaatggtgttatccggcttcctcaaattgaggattgtgga

SEQ ID NO: 887962 - DNA, 75 bp, synthetic construct
  source 1..75: mol_type = other DNA
atgaacgagctgataaatagcaatgtcatcaaaatgactagcattgaaatcgctgagcttacaggtaagcgtcat

SEQ ID NO: 887963 - DNA, 75 bp, synthetic construct
  source 1..75: mol_type = other DNA
atcgcagaccgcctgtttgaaaggctggtgcagcgttcagccagcacgcaaaataaaggtataacctgcgagcat

SEQ ID NO: 887964 - DNA, 75 bp, synthetic construct
  source 1..75: mol_type = other DNA
cgttgggcagacttttccacccgtagcggtactggcgattgccgttccggtgatggggtttggtctgcagccagc

SEQ ID NO: 887965 - DNA, 75 bp, synthetic construct
  source 1..75: mol_type = other DNA
agctccggtgattctggcgggtgtacgaacttcggtgattatcaacattggcacggcgacgatcgcctcaacggt

SEQ ID NO: 887966 - DNA, 75 bp, synthetic construct
  source 1..75: mol_type = other DNA
tgccagcattccgctctccgagtggcaaaaatcgcgcgatagcgtgaagagcgtcaacggtgtgaagcgctataa

SEQ ID NO: 887967 - DNA, 75 bp, synthetic construct
  source 1..75: mol_type = other DNA
cgaactatgacctggtgctgatcgatacgccgccgattctcgcggttaccgatgccgctatcgttggtcgccacg

SEQ ID NO: 887968 - DNA, 75 bp, synthetic construct
  source 1..75: mol_type = other DNA
atgggatcatctcgtctggaatcacgcattgtgcatctcggttgcggggcgtttcaccgcgcgcaccaggcgctg

SEQ ID NO: 887969 - DNA, 75 bp, synthetic construct
  source 1..75: mol_type = other DNA
ccgttggcgagagcttgaagaagctgcggttaatatccccaaaacgctaccggaagcgttgcgccttgctgctga

SEQ ID NO: 887970 - DNA, 75 bp, synthetic construct
  source 1..75: mol_type = other DNA
tggcgatgctgcccgatgccgacgtattgtcgtttaaatttggcgttgcttacggcaatgtttttggtcatcgcg

SEQ ID NO: 887971 - DNA, 75 bp, synthetic construct
  source 1..75: mol_type = other DNA
gatttgccgctggaagccaaagcggtgctggattcgatggtgaatatcgatgcgcagctgaatgaactgaccttc

SEQ ID NO: 887972 - DNA, 75 bp, synthetic construct
  source 1..75: mol_type = other DNA
gcagtgctggcgattgccgttccggtgatcggctttggtctgcaacccgcgattatcgccttgatcctttacggc

SEQ ID NO: 887973 - DNA, 75 bp, synthetic construct
  source 1..75: mol_type = other DNA
attgccaaatttgacctgatcccgcgcggtcaggtaccgccaaatccttctgaactgttgatgagcgaacgcttt

SEQ ID NO: 887974 - DNA, 75 bp, synthetic construct
  source 1..75: mol_type = other DNA
ttttcgtttataaacagaaaggaaacctcataatgtcagatatcacaatcccccacccgaacgcggtcaacgggc

SEQ ID NO: 887975 - DNA, 75 bp, synthetic construct
  source 1..75: mol_type = other DNA
caacgatgaactgttcgggattatctataccgttgacgaaggcgatgactggaccgacccgcaggtgctggaaaa

SEQ ID NO: 887976 - DNA, 75 bp, synthetic construct
  source 1..75: mol_type = other DNA
gtgtttacgcttaatgtgctggacaacaaaaactacactttgagcagcgacggcggctttagcgctcgtgggcaa

SEQ ID NO: 887977 - DNA, 75 bp, synthetic construct
  source 1..75: mol_type = other DNA
cctctgtgccgtggtttacaccttcttcgccacgccgatatacagcgccgacgcactggtacaaatcgagcaaag

SEQ ID NO: 887978 - DNA, 75 bp, synthetic construct
  source 1..75: mol_type = other DNA
ggatgatcaaccaactgcaaaacagcctgacggtaacggagaacggcaaagacgcaggcgtactgagcctgactt

SEQ ID NO: 887979 - DNA, 75 bp, synthetic construct
  source 1..75: mol_type = other DNA
acgatccggaacacccagccccggatgaaagcgtgattaacgcagtcagggaccacatccttcctctggcacctg

SEQ ID NO: 887980 - DNA, 75 bp, synthetic construct
  source 1..75: mol_type = other DNA
gggcgtggccaacagtggctgaccagaaagctgctcgataacggaatgctgaaagtaacaggggaggctgcttaa

SEQ ID NO: 887981 - DNA, 75 bp, synthetic construct
  source 1..75: mol_type = other DNA
ttgcttataacgccgacactgcccgatttgttgacaaaatggtgcgtgaacacggttttgagcctcaacaactgc

SEQ ID NO: 887982 - DNA, 75 bp, synthetic construct
  source 1..75: mol_type = other DNA
ttggttgtgtatcgtgatgcgctaagagataggcaggattaccaagagaaagcattttctgagattgataattat

SEQ ID NO: 887983 - DNA, 75 bp, synthetic construct
  source 1..75: mol_type = other DNA
ttgccggaagcggattgtatgtattcggtgccacagaaaaagtcatcccgatgacgattgcgttatcgaaagaca

SEQ ID NO: 887984 - DNA, 75 bp, synthetic construct
  source 1..75: mol_type = other DNA
gtggttatgaaaccatcgctgataccatgaccaacgcggattatcgcaaagcggcctttgctctgatgatgcagg

SEQ ID NO: 887985 - DNA, 75 bp, synthetic construct
  source 1..75: mol_type = other DNA
ggtgttctttgatggtatcaccgccggagaaaaagatttctcgacgctggtggcgcgtttgaagaaagaaaatat

SEQ ID NO: 887986 - DNA, 75 bp, synthetic construct
  source 1..75: mol_type = other DNA
aaatcattgatgagctacgccgtgtcagtgtgtacgccaaggaagcccccgcatcgtttggtgcatcgattcagg

SEQ ID NO: 887987 - DNA, 75 bp, synthetic construct
  source 1..75: mol_type = other DNA
tgcgccacctgttccaagggaaacgctactttatgaaaagcactggaacacgagacatacgccaagcgcgattgt

SEQ ID NO: 887988 - DNA, 75 bp, synthetic construct
  source 1..75: mol_type = other DNA
agacggcactgcaacagacacaaacggcaatgaggttagcaatacaataactgtatttaccgaactgcttcacaa

SEQ ID NO: 887989 - DNA, 75 bp, synthetic construct
  source 1..75: mol_type = other DNA
ccgtatttaccgaactgcttcacaatatgcagccagtgcagcgcccggaaaaaggctggatgattgccactggtg

SEQ ID NO: 887990 - DNA, 75 bp, synthetic construct
  source 1..75: mol_type = other DNA
gtatcgcgctggcattcagcaatatggctctggcagaagatattaaagtcgcggtcgtgggcgcaatgtccggtc

SEQ ID NO: 887991 - DNA, 75 bp, synthetic construct
  source 1..75: mol_type = other DNA
cattcagccatcaccggattcgcagtgggtcagtattgtcacgattaacagtgaaaccggctaccggaacatgaa

SEQ ID NO: 887992 - DNA, 75 bp, synthetic construct
  source 1..75: mol_type = other DNA
agcgcgccctgttgcagttactgcctgacgggctggcatgggacaagcgtccgtcatccgtactggcatcgttat

SEQ ID NO: 887993 - DNA, 75 bp, synthetic construct
  source 1..75: mol_type = other DNA
acttgagcgacgaagagcaaatcgaattgctcgagctactcgaagaagaagagaactaccggaacacacacctgc

SEQ ID NO: 887994 - DNA, 75 bp, synthetic construct
  source 1..75: mol_type = other DNA
gaataaacacaatatggcactggttactatcgaagatctggtgtcataccgtcaggcacatgagcgtaaagccag

SEQ ID NO: 887995 - DNA, 75 bp, synthetic construct
  source 1..75: mol_type = other DNA
cgggccacgttttcccactccgcgctcaggctggtggtgtactgacgcgtggcggtcatactgaagcaactattg

SEQ ID NO: 887996 - DNA, 75 bp, synthetic construct
  source 1..75: mol_type = other DNA
accagcaggtgtgctgtgtgaattgactaatgatgatggcactatggcgcgtgcgccagaatgcattgaatttgc

SEQ ID NO: 887997 - DNA, 75 bp, synthetic construct
  source 1..75: mol_type = other DNA
cgtaacgcgtgacgactggacaaactccgatgtatacggtacgccatacctggtagattgtgcatgggagcgtac

SEQ ID NO: 887998 - DNA, 75 bp, synthetic construct
  source 1..75: mol_type = other DNA
tcagcaaacgtgcatgttgctcgcagcacctggcgtttactgatccgttatatagacaatcgtatgattgtccga

SEQ ID NO: 887999 - DNA, 75 bp, synthetic construct
  source 1..75: mol_type = other DNA
aacaccagaagcaaaaaagatgcactggttcttcttaaggatatgacggagtggatggactcaaaaataagaaca

SEQ ID NO: 888000 - DNA, 75 bp, synthetic construct
  source 1..75: mol_type = other DNA
tgtcgccagtgaagcgccaggtctgtcttcatcagtcaatattggtgcctttaatcttggaaatgcgctgggagc

SEQ ID NO: 888001 - DNA, 75 bp, synthetic construct
  source 1..75: mol_type = other DNA
agctggcggcatggattgaagagaacgtcaccttcccgtgcaccatggttgaccgcatcgttccggcggcgacgc

SEQ ID NO: 888002 - DNA, 75 bp, synthetic construct
  source 1..75: mol_type = other DNA
agaatgccgactttgttggtgcagtgacagcggcatatcagcaactgtgcgagcgcggcgcgcgcgaatgcgtgg

SEQ ID NO: 888003 - DNA, 75 bp, synthetic construct
  source 1..75: mol_type = other DNA
cttgaagggcaagcgggagaactggtgaaaaaggatggagttgaattatttgtcacggatttgaacgcgaaagac

SEQ ID NO: 888004 - DNA, 75 bp, synthetic construct
  source 1..75: mol_type = other DNA
gctggtgctgattggtgtcggattctctatcggtaactatctcggcggcaaactggcagatcgttcggttaacgg

SEQ ID NO: 888005 - DNA, 75 bp, synthetic construct
  source 1..75: mol_type = other DNA
aacaccggttttattagctggtttggcaaactgttagcaggcagcttaagcggttattcgccaacgatggtgatg

SEQ ID NO: 888006 - DNA, 75 bp, synthetic construct
  source 1..75: mol_type = other DNA
gtgctgtacccgccggtactgaagtctggcgatcaggtgccgcgctgggcagagacggaactgcaggcaatgggc

SEQ ID NO: 888007 - DNA, 75 bp, synthetic construct
  source 1..75: mol_type = other DNA
cgttcctggcccgtaatgagttcggtgcggcaatcagcatggtggtgtggggcgcggcaacctttgcggtcgtac

SEQ ID NO: 888008 - DNA, 75 bp, synthetic construct
  source 1..75: mol_type = other DNA
atgaaaattaactatccgttgctggcgctggcgctggcgctggcgattggcgcgtttggtatcgggacaacggag

SEQ ID NO: 888009 - DNA, 75 bp, synthetic construct
  source 1..75: mol_type = other DNA
tccggtactgcaaagtattacccacgcaacaccggtgttcgtcacggcaatgctggtgctgattggtgtcggatt

SEQ ID NO: 888010 - DNA, 75 bp, synthetic construct
  source 1..75: mol_type = other DNA
atgaaatctttacaggctctgtttggcggcacctttgatccggtgcactatggtcatcttaaacccgtggaaacg

SEQ ID NO: 888011 - DNA, 75 bp, synthetic construct
  source 1..75: mol_type = other DNA
gtaaagaacgctatgaagatgagatgttcatcattaaatactttaagaagggatctgcacacatcactttcaaaa

SEQ ID NO: 888012 - DNA, 75 bp, synthetic construct
  source 1..75: mol_type = other DNA
cttattggcagggtgtgactatattgaaaaagcgagtaaggtcgacgaactcgttacacagcaagagttgcaaaa

SEQ ID NO: 888013 - DNA, 75 bp, synthetic construct
  source 1..75: mol_type = other DNA
tggtttaacatttcagcaacagtcatccgcgaacgtctggaaaaaggcgaaccgtgtgaagatctgttgcctgaa

SEQ ID NO: 888014 - DNA, 75 bp, synthetic construct
  source 1..75: mol_type = other DNA
gcgacaggaacagggacccgatacgccgctggcgtttattattggtcaggactctctgctgacatttccgacctg

SEQ ID NO: 888015 - DNA, 75 bp, synthetic construct
  source 1..75: mol_type = other DNA
tcgaccgtcttcaacctgctgaatctccacagcggaaaaacaaaaataaatgcagcttctgcgcttatatcaagg

SEQ ID NO: 888016 - DNA, 75 bp, synthetic construct
  source 1..75: mol_type = other DNA
gatgatcacatccagtctgttcagggtaaagaggactatgaagatgagatgttcagtatcagatactttaagaag

SEQ ID NO: 888017 - DNA, 75 bp, synthetic construct
  source 1..75: mol_type = other DNA
accggtggggatttcatctgaacagcgggcaacaggcagatcgacttaccgacctggaaagaatgctgcacctgt

SEQ ID NO: 888018 - DNA, 75 bp, synthetic construct
  source 1..75: mol_type = other DNA
gcacatcacgttcaggaaaccagagctggttgacaggctgaatgatattattgcgaaacactatccgggagtgtt

SEQ ID NO: 888019 - DNA, 75 bp, synthetic construct
  source 1..75: mol_type = other DNA
cggacagcaggctgaccgggttgctgacctggaaaggatgctgcacctgttcagcggctggcccatccccgacaa

SEQ ID NO: 888020 - DNA, 75 bp, synthetic construct
  source 1..75: mol_type = other DNA
ctgctctggactgggccatgaaacaggattttcgctgtggctgctggctcatggagaaaccggaaaccgcaatga

SEQ ID NO: 888021 - DNA, 75 bp, synthetic construct
  source 1..75: mol_type = other DNA
tctgagcacatttgaacaactgcaccagaataaagatgaggtgtttgagcggggcgtgatcaacgtcttcatagg

SEQ ID NO: 888022 - DNA, 75 bp, synthetic construct
  source 1..75: mol_type = other DNA
tgacggcggagatctggtttggtcgtcgcttaggtcaggatgccgcgccagagaaactgggcgttgaccgtgcac

SEQ ID NO: 888023 - DNA, 75 bp, synthetic construct
  source 1..75: mol_type = other DNA
gaaaacctcaccgccagcgtggtgaaaaagccggaagaaatcgaagcgttgatggctgctgcgagaaagcaatga

SEQ ID NO: 888024 - DNA, 75 bp, synthetic construct
  source 1..75: mol_type = other DNA
ttcagcgtcgccgtcaggccctggtggagcaaatgcaacccggcagcgccgcgctgatttttgctgcaccagaag

SEQ ID NO: 888025 - DNA, 75 bp, synthetic construct
  source 1..75: mol_type = other DNA
ggattttcgctgcggctgctggctgatggagaaaactgaaacggcaatgaaagctatcacccgcaatcttgaccg

SEQ ID NO: 888026 - DNA, 75 bp, synthetic construct
  source 1..75: mol_type = other DNA
ctgccctggactgggccatgaaacaggattttcgctgcggctgctggctgatggagaaaccggaaacggcaatga

SEQ ID NO: 888027 - DNA, 75 bp, synthetic construct
  source 1..75: mol_type = other DNA
ctggtaaaaatcggcatcctgaaaggtgatgttgaagaactgatcgcccaaaacgcccatcgtcctttctttatg

SEQ ID NO: 888028 - DNA, 75 bp, synthetic construct
  source 1..75: mol_type = other DNA
tctgagcacatttgaacaactgcaccagaagaacgatgaggtgtttgatcggggcgtgatcaacgtcttcatagg

SEQ ID NO: 888029 - DNA, 75 bp, synthetic construct
  source 1..75: mol_type = other DNA
tctgagcacatttgaacaactgcaccagaacaaggatgaggtgtttgatcggggcgtgatcaacgtcttcatagg

SEQ ID NO: 888030 - DNA, 75 bp, synthetic construct
  source 1..75: mol_type = other DNA
tctgagcacatttgaacaactgcaccagaacaatgatgaggtgtttgaacggggcgtgatcaacgtcttcatagg

SEQ ID NO: 888031 - DNA, 75 bp, synthetic construct
  source 1..75: mol_type = other DNA
gctgtacaggatctttggatgttgctgaatggcgataaagccgagcaaaggatgcagctggaaaccattattgaa

SEQ ID NO: 888032 - DNA, 75 bp, synthetic construct
  source 1..75: mol_type = other DNA
gtgacaaagatccgattaccattgatatcagcgcggctaactcgtcgttaagcgggattcgtgatgccatcaaca

SEQ ID NO: 888033 - DNA, 75 bp, synthetic construct
  source 1..75: mol_type = other DNA
atgaagatgagatgttcagcatcagatactttaggaagggctccgcgcatatcacgttcagaaaaccggaactgg

SEQ ID NO: 888034 - DNA, 75 bp, synthetic construct
  source 1..75: mol_type = other DNA
agcgttattcgtatttcgctggtcaacctattaagcgttcccgtatcaaatattggctttcaagctacatggggc

SEQ ID NO: 888035 - DNA, 75 bp, synthetic construct
  source 1..75: mol_type = other DNA
gactgttttgcagtatccctttacccgtgagtagcgcggtcatgctggtttcttatctgcctttactcttttccg

SEQ ID NO: 888036 - DNA, 75 bp, synthetic construct
  source 1..75: mol_type = other DNA
tccgcaacagggcgcggggaatgcgcgttatcgtcgcagctttgtggtgaccggatttatgaccctgataaccgt

SEQ ID NO: 888037 - DNA, 75 bp, synthetic construct
  source 1..75: mol_type = other DNA
cggcactcacgcgactgttttgcagtatccccttaccggtgagtagcgcggtcatgctggtttcttatctgcctt

SEQ ID NO: 888038 - DNA, 75 bp, synthetic construct
  source 1..75: mol_type = other DNA
gatggttcatcaccccactgtgccgtggttgatgaatatcacgagcatgccaccgatgcgctttataccacaatg

SEQ ID NO: 888039 - DNA, 75 bp, synthetic construct
  source 1..75: mol_type = other DNA
tctgacggcggtgattacaggtctggtgaatatcagtaatacctacggtgcgattcgcggtacggatgtttttta

SEQ ID NO: 888040 - DNA, 75 bp, synthetic construct
  source 1..75: mol_type = other DNA
ttcaaaggtatgctcgggctgccgtttggcatagccgacccaattttaaaattcagttaccgccgttcgcgctct

SEQ ID NO: 888041 - DNA, 75 bp, synthetic construct
  source 1..75: mol_type = other DNA
tgcgcgtcgccggaatttattgcgcaacatggcgcgccgaaacatttaaccgatctttctgcattgccgtgcctg

SEQ ID NO: 888042 - DNA, 75 bp, synthetic construct
  source 1..75: mol_type = other DNA
gatgaaagagctggaggcagcgattgaatcgggacgctttcatcatgacggcaatcccatcatgacctggtgtat

SEQ ID NO: 888043 - DNA, 75 bp, synthetic construct
  source 1..75: mol_type = other DNA
cgccgggtacaacattgaggggccgtgctacgacaaacggcgggaagtcatcgagatgctcaacggctcggtgcc

SEQ ID NO: 888044 - DNA, 75 bp, synthetic construct
  source 1..75: mol_type = other DNA
cgattcgcggaacggatgttttttatccgcaacagggcgcggggaattcgcgttaccggcgcagctttgtggcga

SEQ ID NO: 888045 - DNA, 75 bp, synthetic construct
  source 1..75: mol_type = other DNA
aggtattgccagagtattaccaacccgcaaatgtctgggcggtatatgtttcgcgactggctacgtcagcgaagg

SEQ ID NO: 888046 - DNA, 75 bp, synthetic construct
  source 1..75: mol_type = other DNA
gcgcaacatggctggccgaagcatttaacggatctttctgcattaccgtgtctggtcattaaagagcgcgatcat

SEQ ID NO: 888047 - DNA, 75 bp, synthetic construct
  source 1..75: mol_type = other DNA
gcattcaaacggatgcccatcacgctggagccgtggcagctatttgtgatctgctgtgcgtttggctgggtcaat

SEQ ID NO: 888048 - DNA, 75 bp, synthetic construct
  source 1..75: mol_type = other DNA
aagcaaaattgaggcgcttgagaaacaacaggaactcgataagcgcaagatagaacattttgaaaaacaacaaac

SEQ ID NO: 888049 - DNA, 75 bp, synthetic construct
  source 1..75: mol_type = other DNA
aggaaaccagaactggttgacaggctgaatgatattattgcgaaatactatccggaaaccttatcgtccgtttaa

SEQ ID NO: 888050 - DNA, 75 bp, synthetic construct
  source 1..75: mol_type = other DNA
atcgtcaacaatctggtgaggtgggaccggtggggattgcatcttatcaccgggcaacaggcagatagacttgcc

SEQ ID NO: 888051 - DNA, 75 bp, synthetic construct
  source 1..75: mol_type = other DNA
cggaactggtcaacgggcatacggacgttatctgctcaaccagtatccgccacattctggctgtacgaaagagtg

SEQ ID NO: 888052 - DNA, 75 bp, synthetic construct
  source 1..75: mol_type = other DNA
cgttccggaatgctgtcattaatggatgcacaggcccgtgatacgtggtaccggtcactggagtacgataattct

SEQ ID NO: 888053 - DNA, 75 bp, synthetic construct
  source 1..75: mol_type = other DNA
cggaagtggtcaacgggcatacggacgttatctgttccacctcaatcggacacattctggctgtacgaaagacca

SEQ ID NO: 888054 - DNA, 75 bp, synthetic construct
  source 1..75: mol_type = other DNA
gtaaaattatcgtcaacaatctggtgaggtgggaccggtggggatttcatctgaacagcgggcaacaggcagatc

SEQ ID NO: 888055 - DNA, 75 bp, synthetic construct
  source 1..75: mol_type = other DNA
tcactgactcttgagcagttcgaggggcagccgtgcattctggcctttgacctggcgcgtaagctggatatgaac

SEQ ID NO: 888056 - DNA, 75 bp, synthetic construct
  source 1..75: mol_type = other DNA
cggctcgactgatgtgtaaacgcacacccatgctgacggaagcgttcgggattgaggttaacgcctcaaacatga

SEQ ID NO: 888057 - DNA, 75 bp, synthetic construct
  source 1..75: mol_type = other DNA
aggacgaatttgtctttacagaatttaacccggcacaaacccaatacttcattttaaataacggttctgttggtt

SEQ ID NO: 888058 - DNA, 75 bp, synthetic construct
  source 1..75: mol_type = other DNA
tgaactggaattacaaaaccaattgcccctgcaaatttggcagtaaaattatcgtcaacaacctagtgaggtggg

SEQ ID NO: 888059 - DNA, 75 bp, synthetic construct
  source 1..75: mol_type = other DNA
gacagggtacagattgtggctgcgctgatggccatcgatgccgggcttgagcggctgaggcacgccgttcttgag

SEQ ID NO: 888060 - DNA, 75 bp, synthetic construct
  source 1..75: mol_type = other DNA
ctgatggccatcgagagagagttgcgcagcttacggcaggtggtcagggaacagagagtgcaggatgatagttaa

SEQ ID NO: 888061 - DNA, 75 bp, synthetic construct
  source 1..75: mol_type = other DNA
taacgccggcggcggtaccggtcatgacagggtgcagattgtggcggcgctgatggccatcgatgccggacttga

SEQ ID NO: 888062 - DNA, 75 bp, synthetic construct
  source 1..75: mol_type = other DNA
gacagcccgtaaggtgaacagcgggcagtggtcttccggtgaccgggttcaggtggtggccgcactgatggccat

SEQ ID NO: 888063 - DNA, 75 bp, synthetic construct
  source 1..75: mol_type = other DNA
acatttggaactggcaataataaggatgctatgggagctgatttgtctaatagccaaaacatctcaccgggcgct

SEQ ID NO: 888064 - DNA, 75 bp, synthetic construct
  source 1..75: mol_type = other DNA
atgtttatggaaaagatcttgttagtataataatgtcagtattcaattcagaagatactattgcatactcattac

SEQ ID NO: 888065 - DNA, 75 bp, synthetic construct
  source 1..75: mol_type = other DNA
agataatatgaatatttataggagtcaatttaacaaatgtctacgaaaatacgatttatcagaaataactgatat

SEQ ID NO: 888066 - DNA, 75 bp, synthetic construct
  source 1..75: mol_type = other DNA
cttgtgaggctaatctggaaaaagcgttatggctggcgcatgaagttgaagtgctggcgcagctttatctggcga

SEQ ID NO: 888067 - DNA, 75 bp, synthetic construct
  source 1..75: mol_type = other DNA
cgttactgcgtcagctggccgccatcgggaataacctgaatcagacagcgaggaaggtgaacagcgggaagtggt

SEQ ID NO: 888068 - DNA, 75 bp, synthetic construct
  source 1..75: mol_type = other DNA
tggcggtatggatgcggcgggtctgcctgggtgagccggttgcccgttccgggaggctgccgacactggcaccgc

SEQ ID NO: 888069 - DNA, 75 bp, synthetic construct
  source 1..75: mol_type = other DNA
cactggtcttcgattgaccgggttcatgtggtggccgctctgatggccatcgagggtgaattgcgccagttgcgg

SEQ ID NO: 888070 - DNA, 75 bp, synthetic construct
  source 1..75: mol_type = other DNA
cagcaaagcgtacagcgcggacagcatcgtagattataacgatgcacattataaaacctctgtcgatcaagacgc

SEQ ID NO: 888071 - DNA, 75 bp, synthetic construct
  source 1..75: mol_type = other DNA
ggtggcgaaccaaaacgccaccggtagcaatagccgcccgtggaagccgttaggtaaggctcagagctatagcaa

SEQ ID NO: 888072 - DNA, 75 bp, synthetic construct
  source 1..75: mol_type = other DNA
ttacgctcagtacagcaaaatcaaagctctgcgtgaggctggcggtgatgtgatgctgtctatcggtggtgctaa

SEQ ID NO: 888073 - DNA, 75 bp, synthetic construct
  source 1..75: mol_type = other DNA
atgacatcgttgataacctgaacctcaaagtcctggacttcgatatcgaaggcacctgggttgcggatcaggcat

SEQ ID NO: 888074 - DNA, 75 bp, synthetic construct
  source 1..75: mol_type = other DNA
ggtgggttgggtctaaagattgcccacggggtaccagcgctgaaaactccaataacccatggcgtctcgtgcgta

SEQ ID NO: 888075 - DNA, 75 bp, synthetic construct
  source 1..75: mol_type = other DNA
gtaacccaggctcctgttccgttaagccggataataatggcggtgctgtgactccggttgatccaactccggaaa

SEQ ID NO: 888076 - DNA, 75 bp, synthetic construct
  source 1..75: mol_type = other DNA
accagggagcttatgcgccgaatactctgcgcgacctccgtttggtgtttcattcctgggcgcgctggtgtcacg

SEQ ID NO: 888077 - DNA, 75 bp, synthetic construct
  source 1..75: mol_type = other DNA
ctgcaatggagaaaatatttagtgacgcctgggtgttgctgaataaaagagatgccactccaaacaaggggagat

SEQ ID NO: 888078 - DNA, 75 bp, synthetic construct
  source 1..75: mol_type = other DNA
cctgggtgagccggttgcccgttccgggaagctgccgacactggcaccgccgttactgcgtcagctggccgccat

SEQ ID NO: 888079 - DNA, 75 bp, synthetic construct
  source 1..75: mol_type = other DNA
gtaataaatatcaggttattttcgatggcaaaatttatgaaaatgcctggtgggtttcttctacaaattgcccgg

SEQ ID NO: 888080 - DNA, 75 bp, synthetic construct
  source 1..75: mol_type = other DNA
tcactgacccgcgcacaacacgatcccttagtgcaaacctggtcgctggtgctggatattgtgtggatctacctt

SEQ ID NO: 888081 - DNA, 75 bp, synthetic construct
  source 1..75: mol_type = other DNA
accggacgtggaccgggcatagtgcacgtgtcggggccgctattgatatggctgaaaagcaggtgtctatggtgg

SEQ ID NO: 888082 - DNA, 75 bp, synthetic construct
  source 1..75: mol_type = other DNA
ttgcgtcaaatggaaaaattcaattcttctatgatgataaagccacaagaatgtctgttgtatcgtcaatgataa

SEQ ID NO: 888083 - DNA, 75 bp, synthetic construct
  source 1..75: mol_type = other DNA
gacacgccggggaactggtcattgtctgtaccgcgatagtcggggcaggactgggcttcctgtggtttaacacct

SEQ ID NO: 888084 - DNA, 75 bp, synthetic construct
  source 1..75: mol_type = other DNA
aatgagcatatcaaatcttgattttagtctccctggctctatgaataaaattggaaaccgctttgggatttgcct

SEQ ID NO: 888085 - DNA, 75 bp, synthetic construct
  source 1..75: mol_type = other DNA
gaattgtttgaagaagtaggattaagccgcaaagacgttcgaatccttgcttcaacgcgtaactggttgcgctac

SEQ ID NO: 888086 - DNA, 75 bp, synthetic construct
  source 1..75: mol_type = other DNA
gccttcagctttaccactgaccacgtattaccggtcactgcacgttctatcgctatcgttattccgccgattggt

SEQ ID NO: 888087 - DNA, 75 bp, synthetic construct
  source 1..75: mol_type = other DNA
cgacagcaatcgaccttggtggcccgatcaacaaagcggcaggtttcgttgccttcagctttaccactgaccacg

SEQ ID NO: 888088 - DNA, 75 bp, synthetic construct
  source 1..75: mol_type = other DNA
gcaggaaaagacacgccagcaacgcaactggtggtgccgttctttaaagatgtgatgccgcagttaggcttgttt

SEQ ID NO: 888089 - DNA, 75 bp, synthetic construct
  source 1..75: mol_type = other DNA
atcgttcaatccggttcgccaggctatgggacaatatcaggggcagataaatctggtctttaccccatcattgaa

SEQ ID NO: 888090 - DNA, 75 bp, synthetic construct
  source 1..75: mol_type = other DNA
ggtgtggatcttgatttacaaaatgtgttgctttctccaagtgtagttcaagcaaaaaacatcacctttcaggga

SEQ ID NO: 888091 - DNA, 75 bp, synthetic construct
  source 1..75: mol_type = other DNA
gttcttcgtcaaatccacgatgatcggctcattctcattgagcaggccaatcaaggtgtctatgccgcccgaaat

SEQ ID NO: 888092 - DNA, 75 bp, synthetic construct
  source 1..75: mol_type = other DNA
atggatttacaggtgtcgtaggcgcttgtagttgggggggaattgcttttttcgctaacctacccgaaaccgagc

SEQ ID NO: 888093 - DNA, 75 bp, synthetic construct
  source 1..75: mol_type = other DNA
ggctaaacgtacgaagtgaggccagtatatctattccgaatcccacagtaaaactgcctgttaccatgacggggc

SEQ ID NO: 888094 - DNA, 75 bp, synthetic construct
  source 1..75: mol_type = other DNA
cggcgaaggctgatgagtggtctcggaactatcatgtagaggctaccattgatttaatccaccccaggtcagtgc

SEQ ID NO: 888095 - DNA, 75 bp, synthetic construct
  source 1..75: mol_type = other DNA
tatggcggggatcgcgctgggagcaatcattactgcgctgatggtggtgttcttgcgtctgatgatgttccgcaa

SEQ ID NO: 888096 - DNA, 75 bp, synthetic construct
  source 1..75: mol_type = other DNA
atgtttgattttgcttcttaccatcgcgcgaccaccattgccgatgccatcaacctgctgacccacaatccgcag

SEQ ID NO: 888097 - DNA, 75 bp, synthetic construct
  source 1..75: mol_type = other DNA
atgtccataacactggatttgatattacagtatcgcccggttcaggatacggttcatctgctgatgcgtattaca

SEQ ID NO: 888098 - DNA, 75 bp, synthetic construct
  source 1..75: mol_type = other DNA
aacgatgatcgtcgttatagcgaaagtggcagagtgatgctggtggatgcgttgacccgttcgatgaacgtgccg

SEQ ID NO: 888099 - DNA, 75 bp, synthetic construct
  source 1..75: mol_type = other DNA
agctgaaccgcaggtcttccagtcggggacacagagtacagggctggagcttgtggatacgtatctctggatctt

SEQ ID NO: 888100 - DNA, 75 bp, synthetic construct
  source 1..75: mol_type = other DNA
ggatttcttcgaggtgggggaaaacgcgtttacgttgttaaaccgggcggcagggttaaaacaactcaacagtat

SEQ ID NO: 888101 - DNA, 75 bp, synthetic construct
  source 1..75: mol_type = other DNA
ggtgttctttgatggtatcaccgctggggaaaaagatttctcaacgctggtggcgcgtctgaagaaagagaatat

SEQ ID NO: 888102 - DNA, 75 bp, synthetic construct
  source 1..75: mol_type = other DNA
gtgctggcaaacctgaccgccggacgcacggtgcagggtgcgagtacgctgacgcaacagctggtgaaaaacctg

SEQ ID NO: 888103 - DNA, 75 bp, synthetic construct
  source 1..75: mol_type = other DNA
caactgcctgcggcagtttatggccgaatggtcaaccttgagccagacatgaccatcagcaagaacgagatggtg

SEQ ID NO: 888104 - DNA, 75 bp, synthetic construct
  source 1..75: mol_type = other DNA
ggcgatcatctggcgaccatcgtcaatatggagaacaaccgtcagttcggtttcttccgtcttgatccgcgcctg

SEQ ID NO: 888105 - DNA, 75 bp, synthetic construct
  source 1..75: mol_type = other DNA
gggcgtaagcctcgtggtaaacgcggctggctctggctgctactgaaactgggcatcgtatttgcggtgttaatc

SEQ ID NO: 888106 - DNA, 75 bp, synthetic construct
  source 1..75: mol_type = other DNA
gcggcagtttatggccgaatggtcaaccttgagccagacatgaccatcagcaagaacgagatggtgaagctgctg

SEQ ID NO: 888107 - DNA, 75 bp, synthetic construct
  source 1..75: mol_type = other DNA
gtcagcttggggcgaaatacccgaacctgcatctggcagggaaaacagggactaccaacaataacgtagatacct

SEQ ID NO: 888108 - DNA, 75 bp, synthetic construct
  source 1..75: mol_type = other DNA
gctgtggtcctgtttattactgctctggtcgcctggcctttaacatattggccacataaagccttatgccagttc

SEQ ID NO: 888109 - DNA, 75 bp, synthetic construct
  source 1..75: mol_type = other DNA
tctcatcccggcgcttaaaccctggcgttccatcggaaatctgattacgctgatcgtgggtatcctgtgcgtatc

SEQ ID NO: 888110 - DNA, 75 bp, synthetic construct
  source 1..75: mol_type = other DNA
ttgaaggtgcaactgaagttgtcaaaacaacattacaacaggtagggattaaaaaaagccggtcatttaaccgcg

SEQ ID NO: 888111 - DNA, 75 bp, synthetic construct
  source 1..75: mol_type = other DNA
cttcatggcgggcaagtaaagagtttcgtctgcatctcatccagacgatgaccaaaaaagtgattagcgaagccg

SEQ ID NO: 888112 - DNA, 75 bp, synthetic construct
  source 1..75: mol_type = other DNA
ctgcatctcatccagacgatgaccaaaaaagtgattagcgaagccgtcgccgcggcggggggaaaattgcaatga

SEQ ID NO: 888113 - DNA, 75 bp, synthetic construct
  source 1..75: mol_type = other DNA
atgtttgattttgcttcttaccatcgcgcagcaacccttgccgatgccatcaacctgctggctgacaacccgcag

SEQ ID NO: 888114 - DNA, 75 bp, synthetic construct
  source 1..75: mol_type = other DNA
gtgagcaagattgactatcaggcactgcgtgaaaaggcagagaaagcaacgtgtggcgagtggtcgctcgaatat

SEQ ID NO: 888115 - DNA, 75 bp, synthetic construct
  source 1..75: mol_type = other DNA
gttgaggtcatgaaaattgctggagatgcccagctttctaccccatgcactgacagcatcataaacagcattgca

SEQ ID NO: 888116 - DNA, 75 bp, synthetic construct
  source 1..75: mol_type = other DNA
gtgagcgagattgactatcaggcactgcgtgaaaaggcagagaaagcaacgtgtggtgtgtggtcgctcgaatat

SEQ ID NO: 888117 - DNA, 75 bp, synthetic construct
  source 1..75: mol_type = other DNA
ggcgtacaactgacgaacgaaggggataaccgtaagggcgttagtattcgtggtctggacagcagctacaccctg

SEQ ID NO: 888118 - DNA, 75 bp, synthetic construct
  source 1..75: mol_type = other DNA
accgaaagaagacattattagctggaagaagtctcctttctttccgaaccttgttgatcatcttctggttaagca

SEQ ID NO: 888119 - DNA, 75 bp, synthetic construct
  source 1..75: mol_type = other DNA
tctataaaaaggttgccgctgattgtgaattatttatatctcgcgccagagttttatttgaggaagcaaacaggg

SEQ ID NO: 888120 - DNA, 75 bp, synthetic construct
  source 1..75: mol_type = other DNA
ctacggtgaacactggagtccgcgtgcctacctggtttataacgccaccgacaccgtaacggtgaaagggggctg

SEQ ID NO: 888121 - DNA, 75 bp, synthetic construct
  source 1..75: mol_type = other DNA
aagcgtttctatgagcctgttgttttctggattggcggcgagacaaacgagacggtaaccaaaacgactcaacgt

SEQ ID NO: 888122 - DNA, 75 bp, synthetic construct
  source 1..75: mol_type = other DNA
tggaatgtattctgaaccgttataagcctgcatggcagacgtttatttacgtgtatgcaaacagccacgaagagg

SEQ ID NO: 888123 - DNA, 75 bp, synthetic construct
  source 1..75: mol_type = other DNA
caataatacgacgatagcatacgggagtattgtaaaaatcaacgaagatttttattttactgttagcatagtatg

SEQ ID NO: 888124 - DNA, 75 bp, synthetic construct
  source 1..75: mol_type = other DNA
ggcgtacaactgactaacgaaggggataaccgcaagggcgtcagtattcgtggcctggacagcagctacacgctg

SEQ ID NO: 888125 - DNA, 75 bp, synthetic construct
  source 1..75: mol_type = other DNA
agatgcacccgccagtatcagcgtcattacccaggaagacctgcagcgaaaaccggtacagaatctgaaggatgt

SEQ ID NO: 888126 - DNA, 75 bp, synthetic construct
  source 1..75: mol_type = other DNA
cctgccgtggcgcatgtaagattgtgggtagcccggatctgaaacctgaaaccagcgaaagttgggagctggggc

SEQ ID NO: 888127 - DNA, 75 bp, synthetic construct
  source 1..75: mol_type = other DNA
atttaaagcaccttctctgttgcaacttagccctgactggcgagcaattcctgccgtggcgcatgtaagattgtg

SEQ ID NO: 888128 - DNA, 75 bp, synthetic construct
  source 1..75: mol_type = other DNA
ccggtcgattccattgaacgtatcgaagtcgtgcgcggcccgatgtcctcgctgtatggttctgatgcgctcggc

SEQ ID NO: 888129 - DNA, 75 bp, synthetic construct
  source 1..75: mol_type = other DNA
cggcagcccggatctgaaaccagaaaccagcgaaagttgggaactggggctttactacatgggtgaagatggttg

SEQ ID NO: 888130 - DNA, 75 bp, synthetic construct
  source 1..75: mol_type = other DNA
gcagggcgttgcggaacaaaccacgcagccagttgttacttcttgtgccaatgtcgtgggtgtttcccccccccc

SEQ ID NO: 888131 - DNA, 75 bp, synthetic construct
  source 1..75: mol_type = other DNA
acggtggaacaactgaagatgaccgctgaaattgtctgttcggtgttccgtgtcccggcctacaagattggcgtt

SEQ ID NO: 888132 - DNA, 75 bp, synthetic construct
  source 1..75: mol_type = other DNA
cctgacggcgcatctgccggtaagaaggcaatcagtgaaacagagcgtgatgcggtgaaggcgatgttcaggggg

SEQ ID NO: 888133 - DNA, 75 bp, synthetic construct
  source 1..75: mol_type = other DNA
taagagaggcgggctggaccagcctgtttcaggcggtggctgagccctttgccggtgcctggcagcagggcgtga

SEQ ID NO: 888134 - DNA, 75 bp, synthetic construct
  source 1..75: mol_type = other DNA
cgtgatggtcgtgactatgatccggatgttctgcagaaggcggtgaatgatgcggtgagtgccctgccggctccg

SEQ ID NO: 888135 - DNA, 75 bp, synthetic construct
  source 1..75: mol_type = other DNA
catatccctgttccgcgtgacggtcgtgactacgatccggaagtactgcagaaggcggtgaatgatgccgtcggg

SEQ ID NO: 888136 - DNA, 75 bp, synthetic construct
  source 1..75: mol_type = other DNA
caaaatgcggttgcgtctgatgcagacggatgctcaggggatacgcagggaaacgcgccggggggatattgcccg

SEQ ID NO: 888137 - DNA, 75 bp, synthetic construct
  source 1..75: mol_type = other DNA
aactatgactatcaagttggcgatatgcgctttcttattcttattgctcatgctatttttaaatcttttgcctgt

SEQ ID NO: 888138 - DNA, 75 bp, synthetic construct
  source 1..75: mol_type = other DNA
gaagaggtaatattgataggcccctcaatgggggggtatggtgccatgttatatggtgctattcttaaaatgaag

SEQ ID NO: 888139 - DNA, 75 bp, synthetic construct
  source 1..75: mol_type = other DNA
caaaagaaatcaaagcttggcttaacatagataactatcgcaagtttgaagatctctcattgatacacttctatc

SEQ ID NO: 888140 - DNA, 75 bp, synthetic construct
  source 1..75: mol_type = other DNA
cgaaaaaactgaagagcaactgggacagcgggtataccggcgaaaatgcggggaaaacggccattctgagcaacg

SEQ ID NO: 888141 - DNA, 75 bp, synthetic construct
  source 1..75: mol_type = other DNA
gtatcttcagcagcagaactacagtctggaggcgctgtcccgtcgtgatgcccgtgaggatccgttcgcgtctgc

SEQ ID NO: 888142 - DNA, 75 bp, synthetic construct
  source 1..75: mol_type = other DNA
atggcggttggcagagccatgctgtacgagaaagaagacacgctgtctgatcacattgagtcctacgggatccgc

SEQ ID NO: 888143 - DNA, 75 bp, synthetic construct
  source 1..75: mol_type = other DNA
cggaccggaactgcgggatcactgaggcggtgacggtgcctgcccgggaagtgatccacgaccggtttaactgtt

SEQ ID NO: 888144 - DNA, 75 bp, synthetic construct
  source 1..75: mol_type = other DNA
ggagacgcggcaggtgctgggcagtctggacacggagaagccgctgggactgcgtaaccgggcaatactggaagt

SEQ ID NO: 888145 - DNA, 75 bp, synthetic construct
  source 1..75: mol_type = other DNA
accgtaaggccgacggcaacacgctggcggtcggtggacagcttaaccgcctcagcgcggtacgtagcttctacc

SEQ ID NO: 888146 - DNA, 75 bp, synthetic construct
  source 1..75: mol_type = other DNA
gaacgaacacacgacgcagcgccagcacatgctcgcctggctggaaagcctcgacgccgcaggctacagcgcgcg

SEQ ID NO: 888147 - DNA, 75 bp, synthetic construct
  source 1..75: mol_type = other DNA
atgaaacgcttgattgcgctggctttgctgtgcgcgctttctggctgcgcccagaacacgcctccctctgccttt

SEQ ID NO: 888148 - DNA, 75 bp, synthetic construct
  source 1..75: mol_type = other DNA
acgcaggggcatcatattcaggaaaattcgacgtattttttcagaaatggcggcaggccgtccggggtgattgag

SEQ ID NO: 888149 - DNA, 75 bp, synthetic construct
  source 1..75: mol_type = other DNA
ggcgatcctcgggcatgagaagctggagacgacgcaggtctacacgcgggttgccatcggtcatcttcaggaagt

SEQ ID NO: 888150 - DNA, 75 bp, synthetic construct
  source 1..75: mol_type = other DNA
atgcggtcgcgaatattccggtaccggcggacggcaaaagtattacccccgatgatgtgcgtccgatgcttgaac

SEQ ID NO: 888151 - DNA, 75 bp, synthetic construct
  source 1..75: mol_type = other DNA
gatgatgtgcgtccgatgcttgagcagatggtgaaggaggcggtaagccatattcctgttccgcgtgatggtcgt

SEQ ID NO: 888152 - DNA, 75 bp, synthetic construct
  source 1..75: mol_type = other DNA
gccattccggtaccgcgtgatggtcgtgattatgatccggatgtactgcagcaggcggtgaatgatgcggtcgca

SEQ ID NO: 888153 - DNA, 75 bp, synthetic construct
  source 1..75: mol_type = other DNA
gggctcgctgtggcactgcaacagtatgaccggtgataaacccggagaagctcattcatcaggctggaccctggc

SEQ ID NO: 888154 - DNA, 75 bp, synthetic construct
  source 1..75: mol_type = other DNA
gccagtgtacggaaaaaacattttccctgccggtgatgctctaccgcggtgtgttcagagccggtgaaatctacc

SEQ ID NO: 888155 - DNA, 75 bp, synthetic construct
  source 1..75: mol_type = other DNA
aaagtatcaccccggatgatgtgcgtccgatgcttgagcagatggtgaaagaggccgtaagtcatatcccagtcc

SEQ ID NO: 888156 - DNA, 75 bp, synthetic construct
  source 1..75: mol_type = other DNA
cgccaaactggggccgtatgagttcatctgtacgggtcgcccggacgaaggcatcccggcggtttgcttcaaact

SEQ ID NO: 888157 - DNA, 75 bp, synthetic construct
  source 1..75: mol_type = other DNA
cggtctggctccgctgggctgcggctgggttatctggcgtgacgaagaagcgctgccgcaggaactggtgttcaa

SEQ ID NO: 888158 - DNA, 75 bp, synthetic construct
  source 1..75: mol_type = other DNA
gttcgtcgccccggatatcgtctgggacttccgcctgccgcgtgtgaaatcgatcagtgcttcaggccataaatt

SEQ ID NO: 888159 - DNA, 75 bp, synthetic construct
  source 1..75: mol_type = other DNA
attgtcgccatcgccgatgtgaccgcttttggtatctatatgggtgtctggttcccgacggtgccgcactggatt

SEQ ID NO: 888160 - DNA, 75 bp, synthetic construct
  source 1..75: mol_type = other DNA
tgcgtgcgctgggggaaatgtcggtacataacccggccgccagctctttctcgcgttatgcgcaggaaaacctcg

SEQ ID NO: 888161 - DNA, 75 bp, synthetic construct
  source 1..75: mol_type = other DNA
tgatgtttcaggatgcgcgtctgctgccgtggaaatcggtgattgataacgttgggttaggccttaaaggccagt

SEQ ID NO: 888162 - DNA, 75 bp, synthetic construct
  source 1..75: mol_type = other DNA
gctggaagactacaaagcctccctgaaatatctcagcgatcacccgaaactgcagggtattgcccagcagaacag

SEQ ID NO: 888163 - DNA, 75 bp, synthetic construct
  source 1..75: mol_type = other DNA
aggcgatgaatcttttctcgccgaagcgacgcctgccaccacggaattgtgggaaaaagtaatggaaggcatccg

SEQ ID NO: 888164 - DNA, 75 bp, synthetic construct
  source 1..75: mol_type = other DNA
tatttcgtacaccttctcgatcgtcccggcggcgctgggtaaagaagatccggtacgcaaaaccaaccttgttgg

SEQ ID NO: 888165 - DNA, 75 bp, synthetic construct
  source 1..75: mol_type = other DNA
cgaggcctgtatgctcggcgggatggcgatgaaatggcgttggcgcaagcgtatggaagctgcaggcaaaccaac

SEQ ID NO: 888166 - DNA, 75 bp, synthetic construct
  source 1..75: mol_type = other DNA
gacaaagaagaatatccgcaatccgcagccatcgacctgcgttgcgtaaatatggttgccgatctgtggcatgcg

SEQ ID NO: 888167 - DNA, 75 bp, synthetic construct
  source 1..75: mol_type = other DNA
ggatacaccctgtacgacctctctgaacgtctgcgtctgcgcggctggcaggttccggccttcactctcggcggt

SEQ ID NO: 888168 - DNA, 75 bp, synthetic construct
  source 1..75: mol_type = other DNA
ctgctgtcgcaaatcgccttccgtcgccgtttgccgccagaagaagttaaggcgctgaaatttaaagtgccgggt

SEQ ID NO: 888169 - DNA, 75 bp, synthetic construct
  source 1..75: mol_type = other DNA
gcacagtactatgaattcctgcgcctcggtcgtgaaggctatacaaaagtacagaacgcatccgatcgcacgttc

SEQ ID NO: 888170 - DNA, 75 bp, synthetic construct
  source 1..75: mol_type = other DNA
acctggccactttctgccagacctgggacgacgagaaggtccataaattgatggatttatctataaagaaaaact

SEQ ID NO: 888171 - DNA, 75 bp, synthetic construct
  source 1..75: mol_type = other DNA
acctggccactttctgccagacctgggacgacgagaatgtccataaattgatggatttgtcaataaagaaaaact

SEQ ID NO: 888172 - DNA, 75 bp, synthetic construct
  source 1..75: mol_type = other DNA
gatccgaactactcgattcacgttttggcgcgaagccgatttcgactatcgcagaatcaaaacgttttccgctgc

SEQ ID NO: 888173 - DNA, 75 bp, synthetic construct
  source 1..75: mol_type = other DNA
gcacagtactatgaattcctgcgcctcggtcgtgaaggctatacaaaagtacagaacgcgtccaatcgcacgttc

SEQ ID NO: 888174 - DNA, 75 bp, synthetic construct
  source 1..75: mol_type = other DNA
gcacagtactatgaattcctgcgcctcggtcgtgaaggctatacaaaagtacagaacgcttcctatcgcacgttc

SEQ ID NO: 888175 - DNA, 75 bp, synthetic construct
  source 1..75: mol_type = other DNA
catatcgtctgggacttccgcctgccgcgtgtgaaatcgatcagtgcttcaggccataaattcggtctggctccg

SEQ ID NO: 888176 - DNA, 75 bp, synthetic construct
  source 1..75: mol_type = other DNA
gacctgcgttgcgtaaacatggttgccgatctgtggcatgcgcctgcaccgaaaaatggtcaggccgttggcacc

SEQ ID NO: 888177 - DNA, 75 bp, synthetic construct
  source 1..75: mol_type = other DNA
cttacggtgggatcgaaattatcgggattaccgccggtgaagcgaaagatcctgagaaatcgattccgcgtgcga

SEQ ID NO: 888178 - DNA, 75 bp, synthetic construct
  source 1..75: mol_type = other DNA
acctggccactttctgccagacctgggacgacgagaatgtccataaattgatggatttatcgataaagaaaaact

SEQ ID NO: 888179 - DNA, 75 bp, synthetic construct
  source 1..75: mol_type = other DNA
acctggccactttctgccagacctgggacgacgagaaagtccataaattgatggatttgtctataaagaaaaact

SEQ ID NO: 888180 - DNA, 75 bp, synthetic construct
  source 1..75: mol_type = other DNA
ccgcccggcgggtcaggtgattgcacagtactatgaattcctgcgcctcggtcgtgaaggctataccaaagtaca

SEQ ID NO: 888181 - DNA, 75 bp, synthetic construct
  source 1..75: mol_type = other DNA
tgtcggtggcgacggattcactttccgccattaaatatgcccgtgtgaaacccatccgtgacgaaaacggtctgg

SEQ ID NO: 888182 - DNA, 75 bp, synthetic construct
  source 1..75: mol_type = other DNA
ggcgttggcgcaagcgtatggaagccgcaggcaaacccacggataaaccaaacctggtgtgcggtccggtacaaa

SEQ ID NO: 888183 - DNA, 75 bp, synthetic construct
  source 1..75: mol_type = other DNA
acttctcccgcccggcgggtcaggtgattgcacagtactatgaattcctgcgcctcggtcgtgaaggctatacca

SEQ ID NO: 888184 - DNA, 75 bp, synthetic construct
  source 1..75: mol_type = other DNA
aggtggatgaggttcctgtttaccggaagaaaaaaacagagcaggagaataaaccccgtcgctgtgaggcggctg

SEQ ID NO: 888185 - DNA, 75 bp, synthetic construct
  source 1..75: mol_type = other DNA
gtgacgaagaagcgctgccgcaggaactggtgttcaacgttgactacctgggtggtcaaattggtactttcgcca

SEQ ID NO: 888186 - DNA, 75 bp, synthetic construct
  source 1..75: mol_type = other DNA
tcgccaaactggggccgtatgagttcatctgtacgggtcgcccggacgaaggcatcccggcggtttgcttcaaac

SEQ ID NO: 888187 - DNA, 75 bp, synthetic construct
  source 1..75: mol_type = other DNA
gcggtttgcttcaaactgaaagatggtgaagatccgggatacaccctgtatgacctctctgaacgtctgcgtctg

SEQ ID NO: 888188 - DNA, 75 bp, synthetic construct
  source 1..75: mol_type = other DNA
acggccttactcttgttgagactaaagcggggagtaacaaaaagacagttcgtgtgaacagtgacgatctgcgcc

SEQ ID NO: 888189 - DNA, 75 bp, synthetic construct
  source 1..75: mol_type = other DNA
ctttatttgcggggcgaaaggggatgcccgccattgcgcgatattttatggatgagttaaccacgcggcttgcca

SEQ ID NO: 888190 - DNA, 75 bp, synthetic construct
  source 1..75: mol_type = other DNA
taccaaagtacagaacgcttcctaccaggttgccgcttatctggcggatgaaatcgccaaactggggccgtatga

SEQ ID NO: 888191 - DNA, 75 bp, synthetic construct
  source 1..75: mol_type = other DNA
gatgccgcgaaaaaagcggctaaccgttttgcggtaccaccaccaccacgactggtggtgaataacgataatgag

SEQ ID NO: 888192 - DNA, 75 bp, synthetic construct
  source 1..75: mol_type = other DNA
tgccgactttcggcgtgacctataccggtaactatgagttcccgcagccgctgcacgatgcgctggataaattcc

SEQ ID NO: 888193 - DNA, 75 bp, synthetic construct
  source 1..75: mol_type = other DNA
cgacgacggaactgtgacagtggtgaatgtgataaataaccgtgtagctgtgtgccgtaaaggggaatcatgcaa

SEQ ID NO: 888194 - DNA, 75 bp, synthetic construct
  source 1..75: mol_type = other DNA
ggctgggttatctggcgtgatgaagaagcgctgccgcaggaactggtgttcaacgttgactacctcggtggtcag

SEQ ID NO: 888195 - DNA, 75 bp, synthetic construct
  source 1..75: mol_type = other DNA
cggcatcgttcctggatatctacattgagcgcgactttaaagctggcgtactcaatgagcagcaggcacaggaac

SEQ ID NO: 888196 - DNA, 75 bp, synthetic construct
  source 1..75: mol_type = other DNA
atgattaaaagttcattccacgcctatggccgtgaaatggacagtgaatttgaatatctgtttaccgatctgcgt

SEQ ID NO: 888197 - DNA, 75 bp, synthetic construct
  source 1..75: mol_type = other DNA
cggtggcattaatatgattaaaagttcattccacgcctatggccgtgaaatggacagtgaatttgaatatctgtt

SEQ ID NO: 888198 - DNA, 75 bp, synthetic construct
  source 1..75: mol_type = other DNA
ggcaccattgatggacgacgtgctggattacaacaaagtcatggacagcctcgaccatttcatggactggctggc

SEQ ID NO: 888199 - DNA, 75 bp, synthetic construct
  source 1..75: mol_type = other DNA
ccgcatcgttcctcgatatctacattgagcgcgactttaaagccggcgtgcttaatgagcagcaggcgcaggaac

SEQ ID NO: 888200 - DNA, 75 bp, synthetic construct
  source 1..75: mol_type = other DNA
gcatcgcgggcctgtcggtggcgacggactccctgtctgccatcaaatatgcccgcgtgaaaccaatccgtgacg

SEQ ID NO: 888201 - DNA, 75 bp, synthetic construct
  source 1..75: mol_type = other DNA
agggctgaccagcgctattacggcggctgaaatcaaaaccatcttcacttcccgccagtttctcgataaaggcaa

SEQ ID NO: 888202 - DNA, 75 bp, synthetic construct
  source 1..75: mol_type = other DNA
gtacgcccggtatttgccgtttacacttctattagtcagcagtggtatatgcgttggctgaagtcatttatcgac

SEQ ID NO: 888203 - DNA, 75 bp, synthetic construct
  source 1..75: mol_type = other DNA
aagcgctgccgcaggaactggtgttcaacgttgactacctcggtggtcagattgggactttcgccatcaacttct

SEQ ID NO: 888204 - DNA, 75 bp, synthetic construct
  source 1..75: mol_type = other DNA
ttctcccgcccggcgggtcaggtaattgcacagtactatgaattcctgcgcctcggtcgtgaaggctataccaaa

SEQ ID NO: 888205 - DNA, 75 bp, synthetic construct
  source 1..75: mol_type = other DNA
gtccgtaaacagtgcgagacggtggaggtggatgaggttcctgtttaccggaagaaaaaaacagagcaggagaat

SEQ ID NO: 888206 - DNA, 75 bp, synthetic construct
  source 1..75: mol_type = other DNA
ggatcgacaaagaagaatatccgcaatccgctgcaatcgacctgcgttgcgtaaacatggttgccgatctgtggc

SEQ ID NO: 888207 - DNA, 75 bp, synthetic construct
  source 1..75: mol_type = other DNA
atggatactcggctgaataaaacagctgaacacttttggacgattttacgaaataacattgaaaaactcaatggt

SEQ ID NO: 888208 - DNA, 75 bp, synthetic construct
  source 1..75: mol_type = other DNA
gtcgtcgcggcttcgaaatggactttgctgaactgttgctggaagactacaaagcctccctgaaatatctcagtg

SEQ ID NO: 888209 - DNA, 75 bp, synthetic construct
  source 1..75: mol_type = other DNA
aaaaacctggaaagtaatcttaaggcacaaaatttacagcttgatgccgaagataaaaaaagcgatcgccgcact

SEQ ID NO: 888210 - DNA, 75 bp, synthetic construct
  source 1..75: mol_type = other DNA
gtgaaatgcggatttctcatgtcgtcaaagcattgggcgaaacggcacgcgcaaccgcatcggtgatgctggtaa

SEQ ID NO: 888211 - DNA, 75 bp, synthetic construct
  source 1..75: mol_type = other DNA
acttggcgtggcaaacattctcgtcagcaccatgatgggcggcgtcagcgcctctaaccttgctgacgcggcgat

SEQ ID NO: 888212 - DNA, 75 bp, synthetic construct
  source 1..75: mol_type = other DNA
gctgatcagcggggaaaaccaatttttgatattacccattcacagacccctttgctcaactatactccaacttct

SEQ ID NO: 888213 - DNA, 75 bp, synthetic construct
  source 1..75: mol_type = other DNA
agtttatgcaggcgctgctggaagccaaaaaacaagggctgacgcgtgagatcggtatttccaacttcacgatcc

SEQ ID NO: 888214 - DNA, 75 bp, synthetic construct
  source 1..75: mol_type = other DNA
gatttatccattaacaaaaactggatcgacaaagaagaatatccgcaatccgcagccatcgacctgcgttgcgta

SEQ ID NO: 888215 - DNA, 75 bp, synthetic construct
  source 1..75: mol_type = other DNA
aggatacaccctgtacgacctctctgaacgtctgcgtctgcgcggctggcaggttccggctttcactctcggcgg

SEQ ID NO: 888216 - DNA, 75 bp, synthetic construct
  source 1..75: mol_type = other DNA
acaaaatttacagcttgatgccgaagataaaaaagcgatcgccgcactggattgcaacgaccgcctggttagccc

SEQ ID NO: 888217 - DNA, 75 bp, synthetic construct
  source 1..75: mol_type = other DNA
gtggatcactattgcaccgttcgtgacaaaagtggcgtgccgcgtcatgaactctacatcaccactaaaatctgg

SEQ ID NO: 888218 - DNA, 75 bp, synthetic construct
  source 1..75: mol_type = other DNA
agataaaaaagcgatcgccgcactggattgcaacgaccgcctggttagtccggaaggtctggctcctgaatggga

SEQ ID NO: 888219 - DNA, 75 bp, synthetic construct
  source 1..75: mol_type = other DNA
ctgtcgccatttttctcaggcggcaaaagagcgtaatctttcgcaacccgcattcagccgacgaattaaggcgct

SEQ ID NO: 888220 - DNA, 75 bp, synthetic construct
  source 1..75: mol_type = other DNA
tgccgacaaagtatggatcttcgctcatttgctgatgccgcgcctggcgcaggtaaaacagcagccggaagaaga

SEQ ID NO: 888221 - DNA, 75 bp, synthetic construct
  source 1..75: mol_type = other DNA
gcgttggctgaaatcatttatcgacttcgttcccctcgatccgacgcaacccatggcgattaaacatctggtgcg

SEQ ID NO: 888222 - DNA, 75 bp, synthetic construct
  source 1..75: mol_type = other DNA
tacgcacttcagccgcctgaaaggtctggttaaacgtcgcttgttcccgcaaattactctgcatattttgccacc

SEQ ID NO: 888223 - DNA, 75 bp, synthetic construct
  source 1..75: mol_type = other DNA
gcataaaaaaatataaatattcaccattaactaatttgaatgaatgtagaaaatacacctgggaaaaaatagaga

SEQ ID NO: 888224 - DNA, 75 bp, synthetic construct
  source 1..75: mol_type = other DNA
gctgttcctgctgctgctgatggcgttcgtcatctggtttggtaaggatctgatggttaaagtgatgagctacct

SEQ ID NO: 888225 - DNA, 75 bp, synthetic construct
  source 1..75: mol_type = other DNA
acagatgccattactgggcagcggtaaacctgactttgtcacgttgaaaagctgggtagacgaagcggaacaaca

SEQ ID NO: 888226 - DNA, 75 bp, synthetic construct
  source 1..75: mol_type = other DNA
gtggcgttagtacaggcgtggcctgcattatttctgattgttgcggttatcggcggcattcgggcaaatattttc

SEQ ID NO: 888227 - DNA, 75 bp, synthetic construct
  source 1..75: mol_type = other DNA
gacattgaacagcatatgtccaataaatatattgggcggctagtaacccgttttatgaagagaactaatggtgca

SEQ ID NO: 888228 - DNA, 75 bp, synthetic construct
  source 1..75: mol_type = other DNA
ttttattctggatatttatttacttcctgatagtaggtttgcttatcagaaacattcatcttaccagaaaaatta

SEQ ID NO: 888229 - DNA, 75 bp, synthetic construct
  source 1..75: mol_type = other DNA
gtagcaaataccggggctctacctgagatcataggtaaagcaggatttgtcataaatgctgatattgattcaatt

SEQ ID NO: 888230 - DNA, 75 bp, synthetic construct
  source 1..75: mol_type = other DNA
gtctggatcatcctgccagcgccggaatgtttgaaagcgcggattctaaatctctactggcagagtccctggcgg

SEQ ID NO: 888231 - DNA, 75 bp, synthetic construct
  source 1..75: mol_type = other DNA
gcggtttaaaaccttccagcgaacactggccaaaaccgaaagaagtgtcagtggcgctggtgcaggcctggccag

SEQ ID NO: 888232 - DNA, 75 bp, synthetic construct
  source 1..75: mol_type = other DNA
catcaacttctcccgcccggcgggtcaggtgattgcacagtactatgaattcctgcgcctcggtcgtgaaggcta

SEQ ID NO: 888233 - DNA, 75 bp, synthetic construct
  source 1..75: mol_type = other DNA
aaaggtctggaaccgtttatctccgtttccgtggtgaatccgctgatgctggaaaatggctggacctttgatgac

SEQ ID NO: 888234 - DNA, 75 bp, synthetic construct
  source 1..75: mol_type = other DNA
acctggccactttctgccagacctgggacgacgaaaacgtccataaattgatggatttgtcggtgatgctgccaa

SEQ ID NO: 888235 - DNA, 75 bp, synthetic construct
  source 1..75: mol_type = other DNA
actacaaagcctccctgaaatatctcagcgatcacccgaaactgcagggtattgcccaacagaacagctttaaac

SEQ ID NO: 888236 - DNA, 75 bp, synthetic construct
  source 1..75: mol_type = other DNA
ctggaagactacaaagcctccctgaaatatctcagcgatcacccgaaactgcagggtattgcccaacagaacagc

SEQ ID NO: 888237 - DNA, 75 bp, synthetic construct
  source 1..75: mol_type = other DNA
gcggatgaaatcgccaaactggggccgtatgagttcatctgtacgggtcgcccggacgaaggcatcccggcggtt

SEQ ID NO: 888238 - DNA, 75 bp, synthetic construct
  source 1..75: mol_type = other DNA
accagccaggaagcctacgacgaggcggtggtgaaagtgtttgaatcgctggcgcgactggagcagatcttaggt

SEQ ID NO: 888239 - DNA, 75 bp, synthetic construct
  source 1..75: mol_type = other DNA
gctgggctgcggctgggttatctggcgtgatgaagaagcgctgccgcaggaactggtgttcaacgttgactacct

SEQ ID NO: 888240 - DNA, 75 bp, synthetic construct
  source 1..75: mol_type = other DNA
gctccgaactactcgattcacgttttggcgctaagccgatttcgactatcgcagaatcaaaacgatttccgctgc

SEQ ID NO: 888241 - DNA, 75 bp, synthetic construct
  source 1..75: mol_type = other DNA
gttccgaactactcgattcacgttttggcgcgaagccgatttcgactatcgcagaatcaaaacggtttccgctgc

SEQ ID NO: 888242 - DNA, 75 bp, synthetic construct
  source 1..75: mol_type = other DNA
gcgttgcgtaaatatggttgccgatctgtggcatgcgcctgcgccgaaaaatggtcaggccgttggcaccaacac

SEQ ID NO: 888243 - DNA, 75 bp, synthetic construct
  source 1..75: mol_type = other DNA
acatggttgccgatctgtggcatgcgcctgcaccgaaaaatggtcaggccgttggcaccaacaccattggttctt

SEQ ID NO: 888244 - DNA, 75 bp, synthetic construct
  source 1..75: mol_type = other DNA
ggtaactatgagttcccacaaccgctgcacgatgcgctggataaattccaggccgacaccggtatcgacatcgac

SEQ ID NO: 888245 - DNA, 75 bp, synthetic construct
  source 1..75: mol_type = other DNA
ggtctgatcaacgttaccttgtttggcattattttctttcagattcaattgtatgccagcttactgctgcaggta

SEQ ID NO: 888246 - DNA, 75 bp, synthetic construct
  source 1..75: mol_type = other DNA
gttcatctgtacgggtcgcccggacgaaggcatcccggcggtttgcttcaaactgaaagatggtgaagatccggg

SEQ ID NO: 888247 - DNA, 75 bp, synthetic construct
  source 1..75: mol_type = other DNA
ctggcaccgttcgtcgccccggatatcgtctgggacttccgcctgccgcgtgtgaaatcgatcagtgcttcaggc

SEQ ID NO: 888248 - DNA, 75 bp, synthetic construct
  source 1..75: mol_type = other DNA
aattggcgcgttacaggcaggagaggctctctggcactgggcagtggttccattgggtttggctgtcgcaatcct

SEQ ID NO: 888249 - DNA, 75 bp, synthetic construct
  source 1..75: mol_type = other DNA
ctgcacgatgcgctggataaattccaggccgacaccggtatcgacatcgacatgcacatcgacgccgccagcggt

SEQ ID NO: 888250 - DNA, 75 bp, synthetic construct
  source 1..75: mol_type = other DNA
ctctcggcggtgaagccaccgacatcgtggtgatgcgcattatgtgtcgtcgcggcttcgaaatggactttgctg

SEQ ID NO: 888251 - DNA, 75 bp, synthetic construct
  source 1..75: mol_type = other DNA
cgtcagaacctggccactttctgccagacctgggacgacgaaaatgtccacaaattgatggatttatccattaac

SEQ ID NO: 888252 - DNA, 75 bp, synthetic construct
  source 1..75: mol_type = other DNA
cggtcagaatgaagctgagttaaaaattcgctggttgccattgccgaaggctttaacctggctgacgatctgcgt

SEQ ID NO: 888253 - DNA, 75 bp, synthetic construct
  source 1..75: mol_type = other DNA
ccttaacctggctggcggtttgcgttgttgccatcggcctgatgacggtatttatcaatccggtatttgcgttcc

SEQ ID NO: 888254 - DNA, 75 bp, synthetic construct
  source 1..75: mol_type = other DNA
tggagtacatcatcctgacctttattgcgctcaacggcagccggatgtggatcaacagcgcacgtgaaagaggct

SEQ ID NO: 888255 - DNA, 75 bp, synthetic construct
  source 1..75: mol_type = other DNA
aaacattagcgccggtacaactgttggcgctcggcgctatcattgccgcgtcaatgggctccaccctgacagtac

SEQ ID NO: 888256 - DNA, 75 bp, synthetic construct
  source 1..75: mol_type = other DNA
gtgctggcggttcttggtctgtggttcctgctaccgctggggcaagacgtttcccatgtcgatttaaccggctgt

SEQ ID NO: 888257 - DNA, 75 bp, synthetic construct
  source 1..75: mol_type = other DNA
aatatttacggttggtatgcgtggtcgcgacaaaccagtcagaacgaggcggagttgaaaattcgctggttgcca

SEQ ID NO: 888258 - DNA, 75 bp, synthetic construct
  source 1..75: mol_type = other DNA
ctttggccaccgtttgcttaacttccagtcagcgcgggtgacttactttgttaacgcatcgctgtttatctatct

SEQ ID NO: 888259 - DNA, 75 bp, synthetic construct
  source 1..75: mol_type = other DNA
tcacctccaactggcttggttttctctgtggcctgatattcgtagtagggattgcgataattctgtatgaaattc

SEQ ID NO: 888260 - DNA, 75 bp, synthetic construct
  source 1..75: mol_type = other DNA
taaacgcatcgctgtttatttacctggttcaccacccattaacgctgtttttcggtgcatacattactccgcata

SEQ ID NO: 888261 - DNA, 75 bp, synthetic construct
  source 1..75: mol_type = other DNA
cgggccgttcgcctgggggaaagatgcccacgatgcggtgcataacgcggtggtgatggaagaagtggcaaaaat

SEQ ID NO: 888262 - DNA, 75 bp, synthetic construct
  source 1..75: mol_type = other DNA
atgcaaaagctgaaacagcaggtgtttgaagccaatatggatctgccgcgttacgggctggtgacctttacctgg

SEQ ID NO: 888263 - DNA, 75 bp, synthetic construct
  source 1..75: mol_type = other DNA
tctctgcaccgggtaagattatgcaggatgttatccgtcaggatgtgcaacagtctgataatagtaaaattatca

SEQ ID NO: 888264 - DNA, 75 bp, synthetic construct
  source 1..75: mol_type = other DNA
tggcctgtttgctggccaaagaaggcaatgacctcccgattgatgcggcggcgattgtctctgcaccgtttatgc

SEQ ID NO: 888265 - DNA, 75 bp, synthetic construct
  source 1..75: mol_type = other DNA
ggctggctgggcgtggtgatgcattttcgcggatgcagcggtgaaccaaaccgtatgcaccgcatttaccattcg

SEQ ID NO: 888266 - DNA, 75 bp, synthetic construct
  source 1..75: mol_type = other DNA
tactgctggttctgtcgatgatcgtttacggttgcgcattcgacttcttcaacatctctggttcggtgtttgtcg

SEQ ID NO: 888267 - DNA, 75 bp, synthetic construct
  source 1..75: mol_type = other DNA
tattcctcggaatcagttatgcggcaataagaagaacgatttttattgtttatccacctattttaagtgacggca

SEQ ID NO: 888268 - DNA, 75 bp, synthetic construct
  source 1..75: mol_type = other DNA
gccgtctcgtggctgtacccttgcagcagcattggcgtttgtcgcttatttactcaaccagcgctatggcagtgg

SEQ ID NO: 888269 - DNA, 75 bp, synthetic construct
  source 1..75: mol_type = other DNA
tcggcttcattggcggtacgttattccacccgaaaatgtggctcgagtcacgcattcctgactggttatcaacgt

SEQ ID NO: 888270 - DNA, 75 bp, synthetic construct
  source 1..75: mol_type = other DNA
gctgattcttgccattggcggcgagctcgataccgcctttgtgctgcccggtattttctctgatgaccatcctgc

SEQ ID NO: 888271 - DNA, 75 bp, synthetic construct
  source 1..75: mol_type = other DNA
cgtgccggtcgttcgcgcacatggtgggcaccttccgtgggggaacaggtgctgattctggccgtgggcggtgaa

SEQ ID NO: 888272 - DNA, 75 bp, synthetic construct
  source 1..75: mol_type = other DNA
gcggtgaactctcatcaaacggtaaggtactgcatacccacaaacacccaggagacagcggcggcacaaccggga

SEQ ID NO: 888273 - DNA, 75 bp, synthetic construct
  source 1..75: mol_type = other DNA
cgactggcttcagtggctgacccatcgcgccggacgttcgcgcacatggtgggcgccttccgtgggggaacaggt

SEQ ID NO: 888274 - DNA, 75 bp, synthetic construct
  source 1..75: mol_type = other DNA
attacccattcaggcggatcgctttcgtctaatggtgtcgttgtccattctcacaaacatagcggcgtccagtcc

SEQ ID NO: 888275 - DNA, 75 bp, synthetic construct
  source 1..75: mol_type = other DNA
gcaccaacaaactgacgacggcgacgcttgaggtacaacaaggcggcaccatgcgcggaaacatcgaacacaccg

SEQ ID NO: 888276 - DNA, 75 bp, synthetic construct
  source 1..75: mol_type = other DNA
catggtgaaagcgtcaacccgcatcaccctggacacaccggaggtggtctgcaccaacaggctgattaccggtac

SEQ ID NO: 888277 - DNA, 75 bp, synthetic construct
  source 1..75: mol_type = other DNA
ttattgagtacgaacccgagagcggggcgctcacggtgagcggtattaaaaccgctgacgttaccgcgtcggacg

SEQ ID NO: 888278 - DNA, 75 bp, synthetic construct
  source 1..75: mol_type = other DNA
gctgattcttgccattggcggcgagctcgacaccgcttttgtgctgcccggcattttctctgatgaccatcccgc

SEQ ID NO: 888279 - DNA, 75 bp, synthetic construct
  source 1..75: mol_type = other DNA
ttatcgagtacgaacccgaaagcgggtcactcacggtgagtggcatcaaaaccgctgacgtcaccgcgtcggacg

SEQ ID NO: 888280 - DNA, 75 bp, synthetic construct
  source 1..75: mol_type = other DNA
gcaccaacaagctgacgacggcgacgcttgaggtgaaaaagggcggcaccatgcgcggcaacattgaacataccg

SEQ ID NO: 888281 - DNA, 75 bp, synthetic construct
  source 1..75: mol_type = other DNA
gcaccaacaaactgacgacggcgacgcttgaggtgcagaaaggcggcaccatgcggggaaacatcgaacatactg

SEQ ID NO: 888282 - DNA, 75 bp, synthetic construct
  source 1..75: mol_type = other DNA
ccatcaccgcaaccgtgccgctggtactggtgaaagcctcgaccagtatcaccctcgacaccccggaggtgattt

SEQ ID NO: 888283 - DNA, 75 bp, synthetic construct
  source 1..75: mol_type = other DNA
tcctctcttttctgcagttctgtctgtggggaagttggctgacgaccctcggctcctatatgtttgttaccctga

SEQ ID NO: 888284 - DNA, 75 bp, synthetic construct
  source 1..75: mol_type = other DNA
gtctggtaaacagcctcaaaggcgttttgtggagtgctggctattttgccagtagctgcggaggtgcgccaatac

SEQ ID NO: 888285 - DNA, 75 bp, synthetic construct
  source 1..75: mol_type = other DNA
caacatcaaagtattagagccttgcaaaccattatgcgtctcagtttgtctcatctatcttacgcaaaaaaaata

SEQ ID NO: 888286 - DNA, 75 bp, synthetic construct
  source 1..75: mol_type = other DNA
tggtaaacagcctcaaaggcgtatcgggtaggttactgcgacgagatcgaccagatattgcagtcaggtattact

SEQ ID NO: 888287 - DNA, 75 bp, synthetic construct
  source 1..75: mol_type = other DNA
gcgacgcatctcgaactctaccgtcgttatccgtcgcttggtggtattgtccatacccactccactcatgccacc

SEQ ID NO: 888288 - DNA, 75 bp, synthetic construct
  source 1..75: mol_type = other DNA
ttactgcgacgagatcgaccagatattacagtcaggtattactacaaaggcgttttgtggagtcctggctatttt

SEQ ID NO: 888289 - DNA, 75 bp, synthetic construct
  source 1..75: mol_type = other DNA
ttaattaactatcctcccaaactggcgatatccagtctggtaaacagcctcaaaggcgtatcgagtaggttactg

SEQ ID NO: 888290 - DNA, 75 bp, synthetic construct
  source 1..75: mol_type = other DNA
agtatcagagacttcgcagtcaataacggtttgagtggtgaagatatcattgttactggctatagtctgggcggc

SEQ ID NO: 888291 - DNA, 75 bp, synthetic construct
  source 1..75: mol_type = other DNA
ttcaaatgttgatgttaattttggtgatattaatatatcgctaataaatacatcacttgacaacatcactcatag

SEQ ID NO: 888292 - DNA, 75 bp, synthetic construct
  source 1..75: mol_type = other DNA
aaataatgttgaggcaggtattgcaggaggacggatatatttcgttaatacagcgcttgaggatataaatcacaa

SEQ ID NO: 888293 - DNA, 75 bp, synthetic construct
  source 1..75: mol_type = other DNA
cagcggtgtcgcctacgaaaccatgaaagcagacgatatggtggtggtcgatatgagcggtaaggtggtggaagg

SEQ ID NO: 888294 - DNA, 75 bp, synthetic construct
  source 1..75: mol_type = other DNA
atgcaaaagctaaaacagcaggtgtttgaagccaatatggatctgccgcattacgggctggtgacctttacctgg

SEQ ID NO: 888295 - DNA, 75 bp, synthetic construct
  source 1..75: mol_type = other DNA
ccacaactcaatcacatcgacagcttcctgatgaataaacacttcatgcgtaagcacggtcctaacgcttattac

SEQ ID NO: 888296 - DNA, 75 bp, synthetic construct
  source 1..75: mol_type = other DNA
aggtgcagggcgagtacgaactgaacaccggcaaagtaattatcgaaacgctgggcaacgccgagccgctgcata

SEQ ID NO: 888297 - DNA, 75 bp, synthetic construct
  source 1..75: mol_type = other DNA
tgttgacggttaatatgcacgctgccagcaaggctgatccgcaaaccgtggtggatgccagctatagcgtgacag

SEQ ID NO: 888298 - DNA, 75 bp, synthetic construct
  source 1..75: mol_type = other DNA
cccatgtgctggcgctaatttgcagtgctgggctttgtgccatttccggtacgttgtatgtaaaaagccgcacag

SEQ ID NO: 888299 - DNA, 75 bp, synthetic construct
  source 1..75: mol_type = other DNA
aaagaaaccgatatccggcgtggaaggcattgtgttttcctgatgcatgttcacctggtctttgtcaccagatac

SEQ ID NO: 888300 - DNA, 75 bp, synthetic construct
  source 1..75: mol_type = other DNA
tgaaactgtcaaccaataacgcactatggcaacggcagcgcgacgacatggatttaaactgtggcacgattgttg

SEQ ID NO: 888301 - DNA, 75 bp, synthetic construct
  source 1..75: mol_type = other DNA
aaaagtaattatggatattgctaaggtaggtcctgattatatacctggacatgcacatgctgatactctaagtta

SEQ ID NO: 888302 - DNA, 75 bp, synthetic construct
  source 1..75: mol_type = other DNA
atggcagctgtaccggcgaagggctggaaattgtcggacaggggtgactgtatcattgtgcagtgggatgcgaac

SEQ ID NO: 888303 - DNA, 75 bp, synthetic construct
  source 1..75: mol_type = other DNA
tgacacgcaataccagtacagcgatgtgaatgtcattgccattcatcacgcgctggtcaaatcaggcatcacgcc

SEQ ID NO: 888304 - DNA, 75 bp, synthetic construct
  source 1..75: mol_type = other DNA
gacgcgacagaaaaactacgcacttacttttcaaatgtatgtgctgattttgaagctgaactggttgaaatggat

SEQ ID NO: 888305 - DNA, 75 bp, synthetic construct
  source 1..75: mol_type = other DNA
ctggtggacatgtttatatgttacatgatggcagtaatcagcacttgtccaaactgaatttaactgttccttctt

SEQ ID NO: 888306 - DNA, 75 bp, synthetic construct
  source 1..75: mol_type = other DNA
tagagccttgcaaaccattatgcgtctcagtttgtctcatctatcttacgcaaaaaaaaatagaactaatatcaa

SEQ ID NO: 888307 - DNA, 75 bp, synthetic construct
  source 1..75: mol_type = other DNA
gatgcattcctggcacaaccgcaggacgtcatggactcagtacagaaattacgtcgcctggcacagcagaccgga

SEQ ID NO: 888308 - DNA, 75 bp, synthetic construct
  source 1..75: mol_type = other DNA
tgcgggtggcagttcgccgaccattgcgatttccttgagatccgaattatgaaaatgactttgccgtttaaaccc

SEQ ID NO: 888309 - DNA, 75 bp, synthetic construct
  source 1..75: mol_type = other DNA
ccggttatggcctcgttgaagaagatggtatctggatgaccattcctgtttcagacattgactatgaacaagttt

SEQ ID NO: 888310 - DNA, 75 bp, synthetic construct
  source 1..75: mol_type = other DNA
atgctaaaaactaggcttatcaccgattacatcaattctttaataggtcaggagttcgttcaaggcgagaatgat

SEQ ID NO: 888311 - DNA, 75 bp, synthetic construct
  source 1..75: mol_type = other DNA
gtgcagcagaaacgcagagagggtatgagtattcatgaggcggtgtggcagctggcgtggaagaaatcggggccg

SEQ ID NO: 888312 - DNA, 75 bp, synthetic construct
  source 1..75: mol_type = other DNA
gcctattctgcgcagcgtgctggactccggtggtatcgcctgggtgtttgacatgggggacggctacaagtcgtt

SEQ ID NO: 888313 - DNA, 75 bp, synthetic construct
  source 1..75: mol_type = other DNA
acgtaaaaatgtaccgtttcagcagtacataaacgccggatatttcacagtgaaagaagtggtgctggatgatga

SEQ ID NO: 888314 - DNA, 75 bp, synthetic construct
  source 1..75: mol_type = other DNA
gcgaatacctgctcgaacaggggcatctgaattacgcaaccgtcgcagccgaaacacgcaaggaggcacacagaa

SEQ ID NO: 888315 - DNA, 75 bp, synthetic construct
  source 1..75: mol_type = other DNA
tttgtggtgatccattttcgtaatctggaagggatcgatttcccctggctgctggcgatgttgcaaggctcattc

SEQ ID NO: 888316 - DNA, 75 bp, synthetic construct
  source 1..75: mol_type = other DNA
ctacatcacgccgcagttttcccgcacccatcttaacttccagcgcgttcccactgtcgacacctcaaacccgtt

SEQ ID NO: 888317 - DNA, 75 bp, synthetic construct
  source 1..75: mol_type = other DNA
gaccaccaccaccagcctcgcgtttcgtaaaatattcgcgcagttaaatctgcatgcagccgaggtggaaggcga

SEQ ID NO: 888318 - DNA, 75 bp, synthetic construct
  source 1..75: mol_type = other DNA
gcccacaggtggatgatgaaatggtcgaagccgttggccggtatgttgatacggtctggactcttgcacagaata

SEQ ID NO: 888319 - DNA, 75 bp, synthetic construct
  source 1..75: mol_type = other DNA
agggtgacaaagatacgcattgaagccagaaaacgccgcaaatacaggccacggaaggcctgggccccagcgcaa

SEQ ID NO: 888320 - DNA, 75 bp, synthetic construct
  source 1..75: mol_type = other DNA
tgattattgacgcgctggaaagcgcgattggtactgatgtcatttattttgacggcagacctgcagtgctcgaag

SEQ ID NO: 888321 - DNA, 75 bp, synthetic construct
  source 1..75: mol_type = other DNA
aaatgtcgatccgatgctttattccggttttctctatctgtgtattctccccgctacggttcagtctgcaatcgc

SEQ ID NO: 888322 - DNA, 75 bp, synthetic construct
  source 1..75: mol_type = other DNA
aaaacaatccattttaatgtacagccagattaacactaaatatgataaaaaatcaaaagataagatcttatatca

SEQ ID NO: 888323 - DNA, 75 bp, synthetic construct
  source 1..75: mol_type = other DNA
tattaaagaaatcattgagaactgtaatctttgggagtactctgaagatcgtgatttcattaaagaaaaagagga

SEQ ID NO: 888324 - DNA, 75 bp, synthetic construct
  source 1..75: mol_type = other DNA
cggattcttatctgtgtccggcgcacgaccacacgtagcagcgtgttggtctccatttttaattcagcccttaat

SEQ ID NO: 888325 - DNA, 75 bp, synthetic construct
  source 1..75: mol_type = other DNA
tttctgctcgtgatgtcaccgttacactgcctgactatcccggttcagtgtcgattcctctcaccgtttattgtg

SEQ ID NO: 888326 - DNA, 75 bp, synthetic construct
  source 1..75: mol_type = other DNA
acagcgatgatttccagtttgtgtggaatatttacgccaataatgatgtggtggtgcctactggcggctgtgatg

SEQ ID NO: 888327 - DNA, 75 bp, synthetic construct
  source 1..75: mol_type = other DNA
ctggcataaattcgcccgctactgggatgtggagctgcgtgagatccctatgcgccccggtcagttgtttatgga

SEQ ID NO: 888328 - DNA, 75 bp, synthetic construct
  source 1..75: mol_type = other DNA
cagatccaactgatggtttgcgcggtactggcgcgtcgttacaagcgccagaccgggcagttacagtcgcagcag

SEQ ID NO: 888329 - DNA, 75 bp, synthetic construct
  source 1..75: mol_type = other DNA
gtcgcggcagcggtttgttctgcgtcagcatccagcctgttggggattttcctttcaccattgctggttggtctg

SEQ ID NO: 888330 - DNA, 75 bp, synthetic construct
  source 1..75: mol_type = other DNA
gtcgcagcggcagtttgttctgcgtcggcatccagtctgttgggtatttttctctcgccattactggtcggcctg

SEQ ID NO: 888331 - DNA, 75 bp, synthetic construct
  source 1..75: mol_type = other DNA
ttgccgctgctatgggtctgtcttctgctgcctttgctgcagagactgcgaccacacctgctccgactgcgacga

SEQ ID NO: 888332 - DNA, 75 bp, synthetic construct
  source 1..75: mol_type = other DNA
gtttctggctggatgatgctcaggtcgttgattaccgcgttgtgaagatgcctgttaccaaaggtgggaggctgg

SEQ ID NO: 888333 - DNA, 75 bp, synthetic construct
  source 1..75: mol_type = other DNA
accgcgataacgtcgcccgaatcattaaaaacgcaatgctggatatcggcctggctattcctgtgaaaatccgca

SEQ ID NO: 888334 - DNA, 75 bp, synthetic construct
  source 1..75: mol_type = other DNA
taacccaccgtacagcaatatcagaccgtgggtggaaaaagccgctgagcagtgcatacaacagcgacaggcggt

SEQ ID NO: 888335 - DNA, 75 bp, synthetic construct
  source 1..75: mol_type = other DNA
gtggcgctttatttgacgcctgtgagcagtgcgggcggggtggcgattaaagctggctcattaattgccgtgctt

SEQ ID NO: 888336 - DNA, 75 bp, synthetic construct
  source 1..75: mol_type = other DNA
agaagggaaacagtaaaggctcaatgctgctgatttggcgaccgttcatcagtcctcgacggatgtttactaccg

SEQ ID NO: 888337 - DNA, 75 bp, synthetic construct
  source 1..75: mol_type = other DNA
atagaaagtattaaagcacatctcccgcgaaataaatctcttagcatgaatgacagaaaagataaatcactgagc

SEQ ID NO: 888338 - DNA, 75 bp, synthetic construct
  source 1..75: mol_type = other DNA
tggctgcgctatctcatggctcttgggtttgaggaagctgtattgctggagacggcggcagatctgcgctttgcg

SEQ ID NO: 888339 - DNA, 75 bp, synthetic construct
  source 1..75: mol_type = other DNA
gcgaaacgccgcgcattgtttataattcgagaacggataagccttggccggtggcgctttatctgacgccggtca

SEQ ID NO: 888340 - DNA, 75 bp, synthetic construct
  source 1..75: mol_type = other DNA
ggcggtaagtctgggattaacggcaaattacgcacgtaccggagggcaggtgactgcagggaatgtgcaatcgat

SEQ ID NO: 888341 - DNA, 75 bp, synthetic construct
  source 1..75: mol_type = other DNA
atgaacactctcgcaaatatccaggaactcgcgcgcgcactgcgcaacatgattcgcaccggccttgtcgtcgaa

SEQ ID NO: 888342 - DNA, 75 bp, synthetic construct
  source 1..75: mol_type = other DNA
tacttcattctattaagggaattcatgctagatatgaagtcgagagtttcatagaaagtattagagcacatctcc

SEQ ID NO: 888343 - DNA, 75 bp, synthetic construct
  source 1..75: mol_type = other DNA
ctaccacagtaaagctcgcatggttcgcagataaaggtaaattgacgacgggattgtcatccaactcattccgtc

SEQ ID NO: 888344 - DNA, 75 bp, synthetic construct
  source 1..75: mol_type = other DNA
tgctaagtatgaagtcgagagtttcatagaaagtattaaagcacatctcccgcgaaataaatctcttagcatgaa

SEQ ID NO: 888345 - DNA, 75 bp, synthetic construct
  source 1..75: mol_type = other DNA
taaaaaatcaagtccggtattaaaaaatttatcaggtcataaactgaggcattcttggaactatttctattcaaa

SEQ ID NO: 888346 - DNA, 75 bp, synthetic construct
  source 1..75: mol_type = other DNA
aggaactcgcgcgcgcactgcgcaacatgatccgcaccggcattatcgtcgaaaccgaccttaacgccggtcgct

SEQ ID NO: 888347 - DNA, 75 bp, synthetic construct
  source 1..75: mol_type = other DNA
ccgaaccggatgccggaatgctggcggaaaaagagtggcaggcggctcaggggaatagcggaccggatgtttcgc

SEQ ID NO: 888348 - DNA, 75 bp, synthetic construct
  source 1..75: mol_type = other DNA
cgcgcgactggcgcaacgtttccgtattgatcgcgtactgctggcgggcgatgccgcgcacatcatgccggtatg

SEQ ID NO: 888349 - DNA, 75 bp, synthetic construct
  source 1..75: mol_type = other DNA
ggggtgtcgcgttttccgaatgtgcgctgcttgttttcccgcgagctggaggccttcagtcagcaagatgacgaa

SEQ ID NO: 888350 - DNA, 75 bp, synthetic construct
  source 1..75: mol_type = other DNA
tagttcgccataatattgatggcgttattgcaaccaataccacactcgatcgttctctggttcagggaatgaaaa

SEQ ID NO: 888351 - DNA, 75 bp, synthetic construct
  source 1..75: mol_type = other DNA
caaactctgggtaatacgctgaataaactggcgtcggtaatgacgctgacccgccctgatgccgacgtttctgtc

SEQ ID NO: 888352 - DNA, 75 bp, synthetic construct
  source 1..75: mol_type = other DNA
acgctgaataaactggcgtcggtgatgacgctgacccgccctgatgccgacgtttctgtcgaaaaggtagcctga

SEQ ID NO: 888353 - DNA, 75 bp, synthetic construct
  source 1..75: mol_type = other DNA
ggcggtgcgctggtacgtgagggcgaagcgaagcactctccggtcggcaagatgtttattcagccgaaagtcacg

SEQ ID NO: 888354 - DNA, 75 bp, synthetic construct
  source 1..75: mol_type = other DNA
caacaagcacagctaaagagtcaactggaaactattcaaaaacaacaaactggcataataagcagtacaaagact

SEQ ID NO: 888355 - DNA, 75 bp, synthetic construct
  source 1..75: mol_type = other DNA
ttggcgaccgttcatcagtcctcgacggatgtttactaccgtatccaaagcggcattgatggcgatcgggcaggg

SEQ ID NO: 888356 - DNA, 75 bp, synthetic construct
  source 1..75: mol_type = other DNA
gccgctttggctttttgatgcactggatattgagtttggattctggctggattcggcagcgagcgacaaaaacgc

SEQ ID NO: 888357 - DNA, 75 bp, synthetic construct
  source 1..75: mol_type = other DNA
gccaggtaatgataaaccgcgtctcttccgtctggttgatgctgaaggtttgatcaaccgcatgggctttaataa

SEQ ID NO: 888358 - DNA, 75 bp, synthetic construct
  source 1..75: mol_type = other DNA
cccttttccagcttgatccagagcgcgctcatgagtttacttttcagcaattacgccgtattacaggaacgccgt

SEQ ID NO: 888359 - DNA, 75 bp, synthetic construct
  source 1..75: mol_type = other DNA
tattgcaaccaataccacgctcgatcgttctttggtacagggtatgaaaaattgcgatcaaactgggggcttaag

SEQ ID NO: 888360 - DNA, 75 bp, synthetic construct
  source 1..75: mol_type = other DNA
taatgacggttctacggataacacgttaaaaattctagaagaatattatggaaatcacccgcgagtacgttttat

SEQ ID NO: 888361 - DNA, 75 bp, synthetic construct
  source 1..75: mol_type = other DNA
atgaaaatgactttgccgtttaaaccccatgtgctggcgctcatttgcagtgccgggctttgtgccgcctctgcc

SEQ ID NO: 888362 - DNA, 75 bp, synthetic construct
  source 1..75: mol_type = other DNA
ccagccggagaaccgtttgttgacagctttgtgcgcggattcggctatagcatgggcgttgctaccacgtacgca

SEQ ID NO: 888363 - DNA, 75 bp, synthetic construct
  source 1..75: mol_type = other DNA
gtggtctatattcccaactacaacccaaccgtggtttacgggaactgggccaatactgcgtatccgccggtttat

SEQ ID NO: 888364 - DNA, 75 bp, synthetic construct
  source 1..75: mol_type = other DNA
atatccacggcatggctgactacatcagtcagtatcctggtgtagataccgcccgccttggtctgctgggtattt

SEQ ID NO: 888365 - DNA, 75 bp, synthetic construct
  source 1..75: mol_type = other DNA
tcgggagaaagttcaggagagccgcccgcaacgtctaaacgacagtaaccatactgccaggctgaataacgagca

SEQ ID NO: 888366 - DNA, 75 bp, synthetic construct
  source 1..75: mol_type = other DNA
aaaaaagtcgtaccggtaaatcagcccgccaacgcccctgccacacaatcaaataccgtttctacgtccagcccc

SEQ ID NO: 888367 - DNA, 75 bp, synthetic construct
  source 1..75: mol_type = other DNA
caatgggtcgcgcctgtcgcactgtaccccgattctctgctttcacaagtgttaatggcatcaacctatccggca

SEQ ID NO: 888368 - DNA, 75 bp, synthetic construct
  source 1..75: mol_type = other DNA
gcctcgcctgagcagcgccaggcggttcgcgagaaaatgcagactaacccgcagaaccagcagcgaaaagaggca

SEQ ID NO: 888369 - DNA, 75 bp, synthetic construct
  source 1..75: mol_type = other DNA
caggcggtatctgaccagtcatgggatgccagcgtcaaatcgctggtggcttttccacagttgatggcattgatg

SEQ ID NO: 888370 - DNA, 75 bp, synthetic construct
  source 1..75: mol_type = other DNA
tttcatcaaaccgatgtcagtggcggcatgagcgccacgccgcttcctgcaccgtcgcgcgacagtcagcgtcag

SEQ ID NO: 888371 - DNA, 75 bp, synthetic construct
  source 1..75: mol_type = other DNA
agcggtttaatgaagcggaacactatggcaattatgacgacttccgcgagttcagccgccaccaaccactgaccc

SEQ ID NO: 888372 - DNA, 75 bp, synthetic construct
  source 1..75: mol_type = other DNA
aactggcgcaacaaaccggctcgctgaagtcatcaactgaacaaaagatcatcacgacaacgaaaaaagtcgtac

SEQ ID NO: 888373 - DNA, 75 bp, synthetic construct
  source 1..75: mol_type = other DNA
aaatcgatagcaaccatcagcatgtttaattcaggccttgtgcgccgcaacggtatgcaggattcacagctggat

SEQ ID NO: 888374 - DNA, 75 bp, synthetic construct
  source 1..75: mol_type = other DNA
ctattgaaaaaattatgtctccatttgcaaaaaaaattatcactgtttctcagcaagataaagacttagcaatta

SEQ ID NO: 888375 - DNA, 75 bp, synthetic construct
  source 1..75: mol_type = other DNA
aaaccaccgagatacaggcgcaactggatgacctggatcgcctgaacaacgcgttaagcgcgatgagttcggtga

SEQ ID NO: 888376 - DNA, 75 bp, synthetic construct
  source 1..75: mol_type = other DNA
caagcaggtggatgtcgccaccaacaacactgaaaacctcgacaagctgaaaacctccgcgccggagaagctgaa

SEQ ID NO: 888377 - DNA, 75 bp, synthetic construct
  source 1..75: mol_type = other DNA
cctgaacgatctttatagcattgctaatttcctcccggacaataatctgacaccaaatgagagctggaaaagatt

SEQ ID NO: 888378 - DNA, 75 bp, synthetic construct
  source 1..75: mol_type = other DNA
gctcagaagagtatcactggagataagagtgaacgtcttacgcgaaaagtctctatctctgatgcaggaattaca

SEQ ID NO: 888379 - DNA, 75 bp, synthetic construct
  source 1..75: mol_type = other DNA
gtgcgtccttgccagtggtagctacagatgttggaggtgtctctgagttagtagaccataaaaaaaccggcttgc

SEQ ID NO: 888380 - DNA, 75 bp, synthetic construct
  source 1..75: mol_type = other DNA
tgtaaaagcggctgttggtaatgcagtcatcctgctggcaaaagacgtgatatatgacgagtacttttttgatct

SEQ ID NO: 888381 - DNA, 75 bp, synthetic construct
  source 1..75: mol_type = other DNA
tgacatgcgcagaaaggccgtaaatggcaaatctgattatctggttgcgaaaggggtaggtgattttacattccc

SEQ ID NO: 888382 - DNA, 75 bp, synthetic construct
  source 1..75: mol_type = other DNA
atgctgtgatagtacctgtgtatcttattgagcctgctacggccccgacgttaagaaaaccagacaacatcacag

SEQ ID NO: 888383 - DNA, 75 bp, synthetic construct
  source 1..75: mol_type = other DNA
aagagaaagcggtgctggagcgcctgggctgggccccgttccgcgcctccagcgacctgcaactggtgccgattc

SEQ ID NO: 888384 - DNA, 75 bp, synthetic construct
  source 1..75: mol_type = other DNA
gccgaagagcaggaaaaggcgctgaatttcggcattatttcaacggaatcacagcaaaacctgaaaccgcaatgg

SEQ ID NO: 888385 - DNA, 75 bp, synthetic construct
  source 1..75: mol_type = other DNA
aaacctccacgccagcaggaagtcacggctctgcgcacttatctgcaaattcgtatcggtctgcatgcggcgttt

SEQ ID NO: 888386 - DNA, 75 bp, synthetic construct
  source 1..75: mol_type = other DNA
tttccgcgcctcccgtaacgcccgccgtcgttaaaaccgcattcagcactgcgcaaatagatcaatgggttgcac

SEQ ID NO: 888387 - DNA, 75 bp, synthetic construct
  source 1..75: mol_type = other DNA
gcatcgtgcttgagttttacaactccggtaaattgccgctggcgctgcgtccgggcatgttaattggcgcgttaa

SEQ ID NO: 888388 - DNA, 75 bp, synthetic construct
  source 1..75: mol_type = other DNA
tacattgatttaagcgggccgaaagcggaagtcagcgcggcgctgaatcgtgtgatgagcgaagagattgtgctc

SEQ ID NO: 888389 - DNA, 75 bp, synthetic construct
  source 1..75: mol_type = other DNA
taccttccgtggtcacacggcagcgtttatcgatctgagcggtcccaaagatgaagtgagcgccgcgcttgaccg

SEQ ID NO: 888390 - DNA, 75 bp, synthetic construct
  source 1..75: mol_type = other DNA
tcgtacaggagaaagtttgccacggatgcgttttcctgaatttctgagtagaggtgcatggtttccaaaatctat

SEQ ID NO: 888391 - DNA, 75 bp, synthetic construct
  source 1..75: mol_type = other DNA
gtacaaaccaggagtcgtttcaccgcgaaaaaataattctcaaggagaagcggatgaaacagtatttgattgccc

SEQ ID NO: 888392 - DNA, 75 bp, synthetic construct
  source 1..75: mol_type = other DNA
cgtatcgatccaggctggtctggctgcattgtgctggagttttacaactccggtaaattgccgctggcgctgcgt

SEQ ID NO: 888393 - DNA, 75 bp, synthetic construct
  source 1..75: mol_type = other DNA
cagcgattgcgtggcagtgcgttcgcgcaacggcaaggtatttctctggcgttacggctgttaccttcgcactgc

SEQ ID NO: 888394 - DNA, 75 bp, synthetic construct
  source 1..75: mol_type = other DNA
ttgtcttttatttttagtgtgtataacttccataatgcctcggatctacacctgtgcagcgcctggcccgcacga

SEQ ID NO: 888395 - DNA, 75 bp, synthetic construct
  source 1..75: mol_type = other DNA
ctgacgctggaagatcctgtggaatatctctatgccagccagcgatgtttgatccagcagcgggaaattggtttg

SEQ ID NO: 888396 - DNA, 75 bp, synthetic construct
  source 1..75: mol_type = other DNA
gataagccaatcccggaaggtctctacagcgcgaaaaccttcagcgaagaagagatgccgagctttggcgtcagc

SEQ ID NO: 888397 - DNA, 75 bp, synthetic construct
  source 1..75: mol_type = other DNA
gcccgactgcgattgccaccattttcaatgccgatatgggtaaaaccctgctgtacggtactattctggcaatcc

SEQ ID NO: 888398 - DNA, 75 bp, synthetic construct
  source 1..75: mol_type = other DNA
tcggcgagaccatcaaatcctggtcgatgctggaaaccattatctcagtgtgcggtctggtaggctgtctgctgc

SEQ ID NO: 888399 - DNA, 75 bp, synthetic construct
  source 1..75: mol_type = other DNA
acacgaaatccccgaatatctgagccgccttttggtgaggttgcatacccactacttttaccttgttgagcaaat

SEQ ID NO: 888400 - DNA, 75 bp, synthetic construct
  source 1..75: mol_type = other DNA
gcacaaatcgatcaatgggttgcgcctgtcgcgctgtaccccgactctctgctttcacaagtgttaatggcatca

SEQ ID NO: 888401 - DNA, 75 bp, synthetic construct
  source 1..75: mol_type = other DNA
agtcggcttctcctgagcagcgccaggcggctcgcgagaaaatgcagactaacccacagaaccagcagcgaagag

SEQ ID NO: 888402 - DNA, 75 bp, synthetic construct
  source 1..75: mol_type = other DNA
aaatagttcttcctgcaccggagaaattcagtcctgaatcattgccgcacaattttaatatggctgctgtcggcg

SEQ ID NO: 888403 - DNA, 75 bp, synthetic construct
  source 1..75: mol_type = other DNA
ctaacccgcagaaccagcagcgaagagaggcagcgcgccagcgtatccagtctgcctcgcctgagcagcgtcagg

SEQ ID NO: 888404 - DNA, 75 bp, synthetic construct
  source 1..75: mol_type = other DNA
ttgctcaagcagtgcaatggtcgcacgataatccacttaaacaaggcgatgctgctattcaggcggtatctgacc

SEQ ID NO: 888405 - DNA, 75 bp, synthetic construct
  source 1..75: mol_type = other DNA
ctcgtcagcgttatcagtcggcctctcctgagcagcgccaggcagtccgcgagaaaatgcagactaacccgcaga

SEQ ID NO: 888406 - DNA, 75 bp, synthetic construct
  source 1..75: mol_type = other DNA
tcaaaacgaccaatcagatgcatgcttttttgctggaatttggcatcagtatgccgacaggagtcgcagtggtaa

SEQ ID NO: 888407 - DNA, 75 bp, synthetic construct
  source 1..75: mol_type = other DNA
tggttgcctgcgctctggcaaataaactggctcgaattgcctgggtaatcactactcagcaaaaagaatatcagg

SEQ ID NO: 888408 - DNA, 75 bp, synthetic construct
  source 1..75: mol_type = other DNA
agagaatcacttatcagagataaggtgaaaacgaccaaccaaatccacggttttctgctggagttcggaataagc

SEQ ID NO: 888409 - DNA, 75 bp, synthetic construct
  source 1..75: mol_type = other DNA
atggataagaagcaagtaacggatttaaggtcggaactactcgattcacgttttggggctaagtcgatttctact

SEQ ID NO: 888410 - DNA, 75 bp, synthetic construct
  source 1..75: mol_type = other DNA
atggataagaagcaagtaacggatttaaggtcggaactactcgattcacgttttggtgctaagtctatttctact

SEQ ID NO: 888411 - DNA, 75 bp, synthetic construct
  source 1..75: mol_type = other DNA
atggataagaagcaagtaacggatttaaggtcggaactactcgattcacgttttggagctaagtcaatttctact

SEQ ID NO: 888412 - DNA, 75 bp, synthetic construct
  source 1..75: mol_type = other DNA
acctggccactttctgccagacctgggacgacgagaaagtccataaattgatggatttatcgattaaaaaaaact

SEQ ID NO: 888413 - DNA, 75 bp, synthetic construct
  source 1..75: mol_type = other DNA
gccgcaggaactggtgttcaacgttgactacctgggtggtcaaattggtactttcgccatcaacttctcccgccc

SEQ ID NO: 888414 - DNA, 75 bp, synthetic construct
  source 1..75: mol_type = other DNA
ccacccacgttagtgtggccagttccacttctgcacggtttttccagctcttacggtgtattacctccgctttgt

SEQ ID NO: 888415 - DNA, 75 bp, synthetic construct
  source 1..75: mol_type = other DNA
gatcagaactactcgattcacgttttggtgcaaaggccatttcgactatcgcagaatcaaaacgctttccgctgc

SEQ ID NO: 888416 - DNA, 75 bp, synthetic construct
  source 1..75: mol_type = other DNA
acctggccactttctgccagacctgggacgacgagaacgtccataaattgatggatttttcgataaaaaaaaact

SEQ ID NO: 888417 - DNA, 75 bp, synthetic construct
  source 1..75: mol_type = other DNA
acctggccactttctgccagacctgggacgacgagaatgtccataaattgatggatttatcgatgaaaaaaaact

SEQ ID NO: 888418 - DNA, 75 bp, synthetic construct
  source 1..75: mol_type = other DNA
gcatgatccccggtgcgggggcggatattgcagcttttgttgcctataacgaaactcgtcgtttcagtaagacac

SEQ ID NO: 888419 - DNA, 75 bp, synthetic construct
  source 1..75: mol_type = other DNA
gcagccaggcccactgatgtttaccgaccacggcgatatggtttatacgctgtttgtcggcatgatcttttgtta

SEQ ID NO: 888420 - DNA, 75 bp, synthetic construct
  source 1..75: mol_type = other DNA
ttcttttagcggtggaacgctcagcattatcgtattgatgtttctctctccggtacttgccagttgggcgttgaa

SEQ ID NO: 888421 - DNA, 75 bp, synthetic construct
  source 1..75: mol_type = other DNA
atctgccaccactgcgttttatgcgtaatctcgggttaatggcggcggagcgtgctggcgtgttgaaacgtcagg

SEQ ID NO: 888422 - DNA, 75 bp, synthetic construct
  source 1..75: mol_type = other DNA
gccagttatcctgtcctcaagcgttaccagatgcggcgcatggcggataacttcattatgcaaagtggtatggat

SEQ ID NO: 888423 - DNA, 75 bp, synthetic construct
  source 1..75: mol_type = other DNA
aaacgtgggagtgggaaacggcgcatgtgatgtttgacgccgctgaacttaagctgccgctgcttggctatatgg

SEQ ID NO: 888424 - DNA, 75 bp, synthetic construct
  source 1..75: mol_type = other DNA
gttctgaactactcgattcacgttttggtgcaaaggccatttcgactatcgcagaatcaaaacgctttccgctgc

SEQ ID NO: 888425 - DNA, 75 bp, synthetic construct
  source 1..75: mol_type = other DNA
tccgctcagaactactcgattcacgttttggtgccaagcctatttccactatcgctgactcaaaacgatttccgc

SEQ ID NO: 888426 - DNA, 75 bp, synthetic construct
  source 1..75: mol_type = other DNA
tccgctcagaactactcgattcacgttttggtgccaagtcaatttcgactatcgctgactcaaaacgatttccgc

SEQ ID NO: 888427 - DNA, 75 bp, synthetic construct
  source 1..75: mol_type = other DNA
catcccggcggtttgcttcaaactgaaagatggtgaagatccgggatacaccctgtacgacctctctgaacgtct

SEQ ID NO: 888428 - DNA, 75 bp, synthetic construct
  source 1..75: mol_type = other DNA
atggataagaagcaagtaacggatttaaggtcggaactactcgattcacgttttggcgccaagtcaatttccact

SEQ ID NO: 888429 - DNA, 75 bp, synthetic construct
  source 1..75: mol_type = other DNA
atggataagaagcaagtaacggatttaaggtcggaactactcgattcacgttttggcgcaaagtccatttcgact

SEQ ID NO: 888430 - DNA, 75 bp, synthetic construct
  source 1..75: mol_type = other DNA
tccgctcagaactactcgattcacgttttggtgccaaggcaatttctactatcgctgactcaaaacgatttccgc

SEQ ID NO: 888431 - DNA, 75 bp, synthetic construct
  source 1..75: mol_type = other DNA
ggtcagaactactcgattcacgttttggtgcgaaggccatttcgactatcgcagaatcaaaacgctttccgctgc

SEQ ID NO: 888432 - DNA, 75 bp, synthetic construct
  source 1..75: mol_type = other DNA
gctccgaactactcgattcacgttttggtgcaaaggccatttcgactatcgcagaatcaaaacgctttccgctgc

SEQ ID NO: 888433 - DNA, 75 bp, synthetic construct
  source 1..75: mol_type = other DNA
gctcagaactactcgattcacgttttggtgccaaggccatttcgactatcgcagaatcaaaacgctttccgctgc

SEQ ID NO: 888434 - DNA, 75 bp, synthetic construct
  source 1..75: mol_type = other DNA
ccgactttcggcgtgacctacaccggtaactatgagttcccgcaaccgctgcacgatgcgctggataaattccag

SEQ ID NO: 888435 - DNA, 75 bp, synthetic construct
  source 1..75: mol_type = other DNA
atatcgtctgggacttccgcctgccgcgtgtgaaatcgatcagtgcttcaggccataaattcggtctggctccgc

SEQ ID NO: 888436 - DNA, 75 bp, synthetic construct
  source 1..75: mol_type = other DNA
ggtcggaactactcgattcacgttttggtgcaaaggccatttcgactatcgcagaatcaaaacgctttccgctgc

SEQ ID NO: 888437 - DNA, 75 bp, synthetic construct
  source 1..75: mol_type = other DNA
cagtgttcgtccgttatcatacggctttatttcgcaggacgacctggcaaaacagttcctgaacgtttctgaaga

SEQ ID NO: 888438 - DNA, 75 bp, synthetic construct
  source 1..75: mol_type = other DNA
gagctggttaacggcgctgctcgccacctggctgatctgctggtagcaatccagaaagcgggggtagcggcatga

SEQ ID NO: 888439 - DNA, 75 bp, synthetic construct
  source 1..75: mol_type = other DNA
gacgttttgaggaaaacgaagagctggttaacggcgcagctcgccacctggctgatctgttggtagcaatccaga

SEQ ID NO: 888440 - DNA, 75 bp, synthetic construct
  source 1..75: mol_type = other DNA
agctgtcagaaaaatcgtaggtatcaacgttaaaagaatatcagaaacctacggggttaaacctagcccacaatt

SEQ ID NO: 888441 - DNA, 75 bp, synthetic construct
  source 1..75: mol_type = other DNA
cccaagcgaaacattaaaaacagcagttacaacggaatggtttgaacgaaataaagtagaattaggctattggta

SEQ ID NO: 888442 - DNA, 75 bp, synthetic construct
  source 1..75: mol_type = other DNA
tatgctctctggaaatcacgcgcaggagtttaagatatcattctcatatagataatgtgtccttaaaacaaggaa

SEQ ID NO: 888443 - DNA, 75 bp, synthetic construct
  source 1..75: mol_type = other DNA
gcgtaatgctgaaaactcagtttcaaaaaactttccccaatattgcgtttccgggggcgctggcaccgagaaaat

SEQ ID NO: 888444 - DNA, 75 bp, synthetic construct
  source 1..75: mol_type = other DNA
gagctggaaaagattttgtcatacatgcgagcgcttttacgttgctcagaagagtatcactggagataacagtga

SEQ ID NO: 888445 - DNA, 75 bp, synthetic construct
  source 1..75: mol_type = other DNA
gaatggatttaaccggcatagacttgtctaaaatggttctaaggaatgtcaattttaatggcagcattcttagaa

SEQ ID NO: 888446 - DNA, 75 bp, synthetic construct
  source 1..75: mol_type = other DNA
ggaagtgaccttagtaacgcttatcttgaacacatagatttcacaacagtgattctatatgaaacacctgcagca

SEQ ID NO: 888447 - DNA, 75 bp, synthetic construct
  source 1..75: mol_type = other DNA
atctggcaaaaaagattataaatgaattagatgataaaggggctttgttcgtagaatatcatcttgaaaacccct

SEQ ID NO: 888448 - DNA, 75 bp, synthetic construct
  source 1..75: mol_type = other DNA
cagtatgctgacgccgggaaactgccacagcctgtttccttatgtcagaaactcgcgtttacggggtgaagacta

SEQ ID NO: 888449 - DNA, 75 bp, synthetic construct
  source 1..75: mol_type = other DNA
gataatatcaataaaaaagccaatgacagtgccgagaaacaagccagtgacagtaccgataaacaagccagtgac

SEQ ID NO: 888450 - DNA, 75 bp, synthetic construct
  source 1..75: mol_type = other DNA
atctgaacaatgataatatcgtgaaacaagccaataacagtaccgagaaacaagccaatgacagtacggtgcaac

SEQ ID NO: 888451 - DNA, 75 bp, synthetic construct
  source 1..75: mol_type = other DNA
gctgatgacagcaggcaccctctgtttcgtcatcggtctggtcggttttattttttccggcaacagcctgctatt

SEQ ID NO: 888452 - DNA, 75 bp, synthetic construct
  source 1..75: mol_type = other DNA
cccgttatacatttggatacggtttattgaatgggtgcctgcctgctgatttttatatgattgatcattcggata

SEQ ID NO: 888453 - DNA, 75 bp, synthetic construct
  source 1..75: mol_type = other DNA
cggagatcgcctgagggtcacattggatggtgtttataatgggaacaaattttataaagccaatgccagacgtat

SEQ ID NO: 888454 - DNA, 75 bp, synthetic construct
  source 1..75: mol_type = other DNA
tgcccgttgtgctgggttgcgccgttatgtctgcctgggggaaggatgcgggatggcagtggtataacgaaccac

SEQ ID NO: 888455 - DNA, 75 bp, synthetic construct
  source 1..75: mol_type = other DNA
attatgcagaaactggccgcactgcagacggcaacaaagcgggcgctgtacgaagctattctgtatcccggcgtg

SEQ ID NO: 888456 - DNA, 75 bp, synthetic construct
  source 1..75: mol_type = other DNA
tgcaatattccgtgggccgccgacttaacccggctaacatccgcgcgctgatgacagcaggcaccctctgtttcg

SEQ ID NO: 888457 - DNA, 75 bp, synthetic construct
  source 1..75: mol_type = other DNA
ggtgaccgccaaactgatgttggcaggtgttgacccgtttctcgcggcgctgattggcggtgtactggttggcgg

SEQ ID NO: 888458 - DNA, 75 bp, synthetic construct
  source 1..75: mol_type = other DNA
ctttgatgcacggagacttatgctttagtaatatattatttgattttagagcaggtagaattaaattaattgatc

SEQ ID NO: 888459 - DNA, 75 bp, synthetic construct
  source 1..75: mol_type = other DNA
accttaaatcgatactcatcaacaacagaacaaatcatcgccaaaaccaaaagaaatggtttacatgagtttgaa

SEQ ID NO: 888460 - DNA, 75 bp, synthetic construct
  source 1..75: mol_type = other DNA
gacaatatggctgcggtgcaatctttccttaaccgtctgtggaagtctgaaagcaacggcaaacaatggtttgat

SEQ ID NO: 888461 - DNA, 75 bp, synthetic construct
  source 1..75: mol_type = other DNA
ggtggttattacccgcttatcagcgcgtttttgccaatgtgtttaatggtaatttcgatgattacgatccctggg

SEQ ID NO: 888462 - DNA, 75 bp, synthetic construct
  source 1..75: mol_type = other DNA
aagcaacggcaaacagtggtttgatcctgatatcagtgtaatttatccagacaggatccgccgccgccctccagg

SEQ ID NO: 888463 - DNA, 75 bp, synthetic construct
  source 1..75: mol_type = other DNA
aagagcaaggcggcgttctggtccattgcgcgttgggattatcgcgcagtgcgctggtagtggcggcatggctgt

SEQ ID NO: 888464 - DNA, 75 bp, synthetic construct
  source 1..75: mol_type = other DNA
tgtgaggtggcgtaaagtctgcggcggatggtttttactcatcgccatttcgacgctgacgacctggcagcatca

SEQ ID NO: 888465 - DNA, 75 bp, synthetic construct
  source 1..75: mol_type = other DNA
ctttcgcgtcagactgcgctttcgctgccatttccgggccgtacgcgatcccttcggcgaagacaaatttcacat

SEQ ID NO: 888466 - DNA, 75 bp, synthetic construct
  source 1..75: mol_type = other DNA
ctgaaaccgtcggcattattaatcaacaattactcgaaaaattaccggatggcgcgtatctcctcaacctggcgc

SEQ ID NO: 888467 - DNA, 75 bp, synthetic construct
  source 1..75: mol_type = other DNA
ttgttgctggccccgtttttcttcttcacctatggatttcttaatcagttcaccgcggttcaggaccttaaaagc

SEQ ID NO: 888468 - DNA, 75 bp, synthetic construct
  source 1..75: mol_type = other DNA
aatgataatgcttcagttatggtggtcagtctggttatgttggccagtattatcgctattcatcattggccgtgg

SEQ ID NO: 888469 - DNA, 75 bp, synthetic construct
  source 1..75: mol_type = other DNA
tgaagagctgaagcagacgataagtacgctggcaaccgtgtcagcagggctggccggcggtcttaccggaaacat

SEQ ID NO: 888470 - DNA, 75 bp, synthetic construct
  source 1..75: mol_type = other DNA
gggtagccttttaggaggtgtaacagatggcattaagcagtatttaacccttaagccgggtgagaaatatagtgc

SEQ ID NO: 888471 - DNA, 75 bp, synthetic construct
  source 1..75: mol_type = other DNA
gcaacaggtaatcttccggaaggacaggatcctgtcagaggtttactgattgcatggggagcaggtgcttctgtt

SEQ ID NO: 888472 - DNA, 75 bp, synthetic construct
  source 1..75: mol_type = other DNA
gccttataaccagtccccttcgctgcatattattctctgctggctactttggcgtcactttcgtcagcatctggc

SEQ ID NO: 888473 - DNA, 75 bp, synthetic construct
  source 1..75: mol_type = other DNA
ggaatctgcggttggcaatggagaaggaatttcctgatgaagaatggcgttcggcagatttgcgcaaaattctta

SEQ ID NO: 888474 - DNA, 75 bp, synthetic construct
  source 1..75: mol_type = other DNA
tctaaacatgcgaaaggcgatctccctgaaggacaagatccagccagaggtttactggttgcatgggcaccagtt

SEQ ID NO: 888475 - DNA, 75 bp, synthetic construct
  source 1..75: mol_type = other DNA
aactgtctgcatttctgagccaatgtcgggtattgattaatttgttaccgaatacccctgaaaccgtcggcatta

SEQ ID NO: 888476 - DNA, 75 bp, synthetic construct
  source 1..75: mol_type = other DNA
gcaggtgcaacatctttccgacttgctgaatatgagcgacgtggtgagcctgcatgtgcctgaaaacccgtctac

SEQ ID NO: 888477 - DNA, 75 bp, synthetic construct
  source 1..75: mol_type = other DNA
tcggcacaaatcaggttgatctggatgcggcggcaaaacgcgggatcccggtatttaacgcgccgttctcgaata

SEQ ID NO: 888478 - DNA, 75 bp, synthetic construct
  source 1..75: mol_type = other DNA
gacggaaccggcgaccaatagcgatccatttacctctccactgtgtgaattcgacaacgtccttctgacgccaca

SEQ ID NO: 888479 - DNA, 75 bp, synthetic construct
  source 1..75: mol_type = other DNA
cagcagacagaacagcgtggctgcaggtggaagcttcacgtttggctcaatgtccggcagcggctatgccagcat

SEQ ID NO: 888480 - DNA, 75 bp, synthetic construct
  source 1..75: mol_type = other DNA
gcaacagtacaagtgctgccggtacgggtgcacaggcaggtaggaactcggctgaaaacaatatgctgaacgtga

SEQ ID NO: 888481 - DNA, 75 bp, synthetic construct
  source 1..75: mol_type = other DNA
ctgaagcgcaaggcggtgatatatctgtttcgagagattatctagaaataatatctagaatcaaatgtgttattg

SEQ ID NO: 888482 - DNA, 75 bp, synthetic construct
  source 1..75: mol_type = other DNA
gaaccactggcgctggggaaacaagcggcgcagcaaattctacggcgtatcgcgcaacctgatgcgccgctcagc

SEQ ID NO: 888483 - DNA, 75 bp, synthetic construct
  source 1..75: mol_type = other DNA
ctgttaacctggtcctgaatgagatgcgcaagcgccctattcctctgggtatttccagtcgtcatattcatcttt

SEQ ID NO: 888484 - DNA, 75 bp, synthetic construct
  source 1..75: mol_type = other DNA
tgtcaaagaggctaacgggcgacaatggccgggcggtaggctggctggagagtgatatcaataactgggttaaca

SEQ ID NO: 888485 - DNA, 75 bp, synthetic construct
  source 1..75: mol_type = other DNA
tgcatgtgccagaaaatccgtccaccaaaaatatgatgggcgcgaaagagattgcgctgatgaagcccggttcgc

SEQ ID NO: 888486 - DNA, 75 bp, synthetic construct
  source 1..75: mol_type = other DNA
gtttcacaaataccgacaaaatgctttgctggatgccaccatcgctctcatcaatggcgcatcactgacgctgac

SEQ ID NO: 888487 - DNA, 75 bp, synthetic construct
  source 1..75: mol_type = other DNA
tggttctcgctaattaaatgccctgatgaaattaggaatttatcgaaacggataattcgatatcagattgggctg

SEQ ID NO: 888488 - DNA, 75 bp, synthetic construct
  source 1..75: mol_type = other DNA
tgttacggacactgtaaaaccgttaatgaagcgattagctatattcgagccagacgcccgcagattgtgctgaca

SEQ ID NO: 888489 - DNA, 75 bp, synthetic construct
  source 1..75: mol_type = other DNA
ggatgcgcgtctttcagaacagtacctgaaactggcaggtctgtttggtgcacgctactcccactacccctgtgt

SEQ ID NO: 888490 - DNA, 75 bp, synthetic construct
  source 1..75: mol_type = other DNA
attacaaatctcgccagacaatgttgttctcgaacgaaacggtacaaaacagatccttcaaccttgatgagatga

SEQ ID NO: 888491 - DNA, 75 bp, synthetic construct
  source 1..75: mol_type = other DNA
ctgttcattggcctgctgagccagcgtctggttcagctgatatgtccgcactgccgtcgcccctggcatgaggtg

SEQ ID NO: 888492 - DNA, 75 bp, synthetic construct
  source 1..75: mol_type = other DNA
ggcggattttgtcgctaagcgtcttgctccggcattaccggcgaacgatggtaagcaaacccccatgcgtgggca

SEQ ID NO: 888493 - DNA, 75 bp, synthetic construct
  source 1..75: mol_type = other DNA
atatcctccggaaagaagaaggtctcgaattactgggggccacctattccggcatgaccgacgtcatcaagggca

SEQ ID NO: 888494 - DNA, 75 bp, synthetic construct
  source 1..75: mol_type = other DNA
actgttcattggcctgctgagccagcgtctggttcagctgatatgtccgcactgccgtcgcccctggcatgaggt

SEQ ID NO: 888495 - DNA, 75 bp, synthetic construct
  source 1..75: mol_type = other DNA
gcaccacaggcgtcgcctatcgactgccagaagagacgctggagcaggaactaaccctgctgtggaagcgtgaga

SEQ ID NO: 888496 - DNA, 75 bp, synthetic construct
  source 1..75: mol_type = other DNA
aaagcggctaaccgttttgcggtgccaccaccaccacgactggtggtgaataacgataatgagggcaacggatga

SEQ ID NO: 888497 - DNA, 75 bp, synthetic construct
  source 1..75: mol_type = other DNA
aacggatggatttaatgaacagattagcaatgctgttgattatgatatttatctaaaacttagcgaggtaggtcc

SEQ ID NO: 888498 - DNA, 75 bp, synthetic construct
  source 1..75: mol_type = other DNA
gtggaagcccgggttcacggcgaactggaagtgctcgatatcctccggaaagaagaaggtctcgaattactgggg

SEQ ID NO: 888499 - DNA, 75 bp, synthetic construct
  source 1..75: mol_type = other DNA
tcgctctggtttgttggccaggcgggcgctatggacgtcacgccgctgatgcgtgttgatggtttcgccatgctc

SEQ ID NO: 888500 - DNA, 75 bp, synthetic construct
  source 1..75: mol_type = other DNA
ggcgacggcgagcaaaatcgttatcttcggtgtggtgatgcgtctgttcctctacgcaccggtgggtgacagcga

SEQ ID NO: 888501 - DNA, 75 bp, synthetic construct
  source 1..75: mol_type = other DNA
gggtgtttcgttaagtgaggaacaacaacgttatatcgtgacggttatctatcactggctggttattcagatgaa

SEQ ID NO: 888502 - DNA, 75 bp, synthetic construct
  source 1..75: mol_type = other DNA
tgggcaacgctggcgtcaggtcttgccggtggtctggcaggcggagatacacagagtgtggcgaacgcagcccag

SEQ ID NO: 888503 - DNA, 75 bp, synthetic construct
  source 1..75: mol_type = other DNA
agcagggtcgtgcgaagaccatgaaaattgaagtccagggtaaagccgcaccaggaattactgcgaaagatatcg

SEQ ID NO: 888504 - DNA, 75 bp, synthetic construct
  source 1..75: mol_type = other DNA
aaaggcaaagatttcgacgacgccgttgcctactggaaaaccctgcaaaccgacgaaggcgcaactttcgatacc

SEQ ID NO: 888505 - DNA, 75 bp, synthetic construct
  source 1..75: mol_type = other DNA
gttcccggcagccagtatgagcgcgctggtgggtgcctccggcgcaggcaaaactaccgtcaccaaactgttaat

SEQ ID NO: 888506 - DNA, 75 bp, synthetic construct
  source 1..75: mol_type = other DNA
acgcagagtctggtatcggcgctgtctatgcagtccttacccgcgctggtgcgcgctgctggcggttcgctggcg

SEQ ID NO: 888507 - DNA, 75 bp, synthetic construct
  source 1..75: mol_type = other DNA
gcgggggctatagtggaatcatcatctgaaaataccattaaacaaataattaaggatggtgaaaatgaaaagaaa

SEQ ID NO: 888508 - DNA, 75 bp, synthetic construct
  source 1..75: mol_type = other DNA
tcgaacacggcaacaagaaaacctacgcccgcacggcgagtgagtttggctatctgccgctagagcatacgctag

SEQ ID NO: 888509 - DNA, 75 bp, synthetic construct
  source 1..75: mol_type = other DNA
cgcgcggggatcaaattcgaaccgatccgtccgtatgaatttacagggcgcggcgatcgcatcggctgggtaaaa

SEQ ID NO: 888510 - DNA, 75 bp, synthetic construct
  source 1..75: mol_type = other DNA
gtacccgcgcgtatgcggagatctggctcgaccacgaaaaagtcgccactactgatgaagaaccgatccttggtc

SEQ ID NO: 888511 - DNA, 75 bp, synthetic construct
  source 1..75: mol_type = other DNA
cgcttttcgcgtaaagtttaacggtagtaataactatctttatagccttgttaccgcagaagaacaaagcggtag

SEQ ID NO: 888512 - DNA, 75 bp, synthetic construct
  source 1..75: mol_type = other DNA
gatcgtaaaaatgccaaaaccaaatacacgctggagcgcgtgggtgttgagacatttaaagcggaagtggagcgt

SEQ ID NO: 888513 - DNA, 75 bp, synthetic construct
  source 1..75: mol_type = other DNA
gtacccgcgcgtatgcggagatctggctcgatcaggaaaaagtcgccaccactgatgaagaaccgatcctcggcc

SEQ ID NO: 888514 - DNA, 75 bp, synthetic construct
  source 1..75: mol_type = other DNA
atgctgaatgaagcagtacgttgtctggacgagcaggttatccgtagcgtgcgtgacggggatattggcgcggta

SEQ ID NO: 888515 - DNA, 75 bp, synthetic construct
  source 1..75: mol_type = other DNA
gacagaggttcagttgtgcgtcattcaccagatccgtaactcgattaaatatgtggcgtcaaaacaccataaagc

SEQ ID NO: 888516 - DNA, 75 bp, synthetic construct
  source 1..75: mol_type = other DNA
cctgggcgctggatccactggcaaataccattaattggtgggatctgctgtgctgctttttatgcctggttgacg

SEQ ID NO: 888517 - DNA, 75 bp, synthetic construct
  source 1..75: mol_type = other DNA
ctctgcgtaatatcttttttgccagtaccgacgtgaagaaagatcctggcagcgatgttgcccccgccccattaa

SEQ ID NO: 888518 - DNA, 75 bp, synthetic construct
  source 1..75: mol_type = other DNA
tttggcattggttttccgccatttctcggtggaccgttccgctatatcgattctctcggcgcgggcgaagtggtt

SEQ ID NO: 888519 - DNA, 75 bp, synthetic construct
  source 1..75: mol_type = other DNA
ttagcgcgcctgcaaatgttgtttcttcaattttgaacgacgatcgcaaaggcagaaaaaatggtcggggtttct

SEQ ID NO: 888520 - DNA, 75 bp, synthetic construct
  source 1..75: mol_type = other DNA
ccccacaaaacgtgctcaaacagaccacgcaaatgcgcatgtgggtcaccattggcggcgtcagcgccctggttg

SEQ ID NO: 888521 - DNA, 75 bp, synthetic construct
  source 1..75: mol_type = other DNA
ctttgacgaatcctggctgataatctgtgatacgttgctgggcagactgatgcgctgcatgttccagggacggca

SEQ ID NO: 888522 - DNA, 75 bp, synthetic construct
  source 1..75: mol_type = other DNA
taataacccagcttattattttaatcacgggaattactttatttaagatcttaggtggaatcagtcagagttggt

SEQ ID NO: 888523 - DNA, 75 bp, synthetic construct
  source 1..75: mol_type = other DNA
tcgcggcactgatttttttggtatcagtggtttccctgtccggagtggcagctgccgccggtattgcgcgcggtt

SEQ ID NO: 888524 - DNA, 75 bp, synthetic construct
  source 1..75: mol_type = other DNA
tattgaagcggtgtttgaaaatctcgaattaaaacaacaaatggtggcggaagttgagcaaaattgcgccgctca

SEQ ID NO: 888525 - DNA, 75 bp, synthetic construct
  source 1..75: mol_type = other DNA
cagagatgcagttaaatgaaaagggatattattttgccgtattggtgttagggctgttttcggcagcttcctatc

SEQ ID NO: 888526 - DNA, 75 bp, synthetic construct
  source 1..75: mol_type = other DNA
cagaagaatattcgtgatgccggaataaacccaccaaaagaaacacaggttacccaggaagaatacagcgaataa

SEQ ID NO: 888527 - DNA, 75 bp, synthetic construct
  source 1..75: mol_type = other DNA
atattattttgccgtgctggtgctaggactgttttctgcggcatcttatcaaaagaccgttcgtgacaagtatga

SEQ ID NO: 888528 - DNA, 75 bp, synthetic construct
  source 1..75: mol_type = other DNA
cagcggttgcgcggcagtgcgttcgcccaacggcaaggtatttctctggcattacggttgttaccttcgcaccgt

SEQ ID NO: 888529 - DNA, 75 bp, synthetic construct
  source 1..75: mol_type = other DNA
gtgacgtactggttgtggatcgctcgctgacggccagccacggctcaatcgtagtcgcctgcatccataatgaat

SEQ ID NO: 888530 - DNA, 75 bp, synthetic construct
  source 1..75: mol_type = other DNA
caccagatagtgcaggtagtttaggcttgttgctaagttcgtcgaataataaaaaagagtataatgctgacaaga

SEQ ID NO: 888531 - DNA, 75 bp, synthetic construct
  source 1..75: mol_type = other DNA
atctttacggtcagaaagggcgtaaaagcaaaaaacaggtcgatcccgccatttacccgctgattggcgcgcaag

SEQ ID NO: 888532 - DNA, 75 bp, synthetic construct
  source 1..75: mol_type = other DNA
gcgtgacggggacattggcgcggtatttggcattggttttccaccgtttcttggtgggccgttccgctatatcga

SEQ ID NO: 888533 - DNA, 75 bp, synthetic construct
  source 1..75: mol_type = other DNA
cggtcagaattaaagatatcaacccgcagggcataaatcatgcattgaagtacagttgggatcagttggagggca

SEQ ID NO: 888534 - DNA, 75 bp, synthetic construct
  source 1..75: mol_type = other DNA
tgcagtagcggtgcagaaaaatatccgtgatgccggaatcaacgccccaaaagaaacgatggctgcgcaggaaga

SEQ ID NO: 888535 - DNA, 75 bp, synthetic construct
  source 1..75: mol_type = other DNA
tatatgacctgcctggtggtatttatcatctctgtcgcgttactgatggtaggtctgtggaatgcaacgttatta

SEQ ID NO: 888536 - DNA, 75 bp, synthetic construct
  source 1..75: mol_type = other DNA
ttatttctgtgaggaagaaagcagggttgaaccagagagaatttgcagctcgtttaggtatttctaatggtggta

SEQ ID NO: 888537 - DNA, 75 bp, synthetic construct
  source 1..75: mol_type = other DNA
tgacgctggcagactggggtaagcgcgtcgatcctaatgggaaaatcgataaaattaccgaacttctcagtcaaa

SEQ ID NO: 888538 - DNA, 75 bp, synthetic construct
  source 1..75: mol_type = other DNA
caggcggtgagacctccggcgtagtcacacagagcctgggcataaaaggttttcatattggcccaaccatttccc

SEQ ID NO: 888539 - DNA, 75 bp, synthetic construct
  source 1..75: mol_type = other DNA
ttatcgtggcgatgcttgctgctctggtgatcgtcggcgttgttgcctggaatgttcatggcagccgacagtatg

SEQ ID NO: 888540 - DNA, 75 bp, synthetic construct
  source 1..75: mol_type = other DNA
atgatctgggcattcgtaaaattatactggaaacagttacttatcatggcggcgcttgctgttctggccatatcc

SEQ ID NO: 888541 - DNA, 75 bp, synthetic construct
  source 1..75: mol_type = other DNA
ctgctgaaactgtataccgaagatgccgcagaagcacgtggctggctacctggcgggcagctgcacagcgatttg

SEQ ID NO: 888542 - DNA, 75 bp, synthetic construct
  source 1..75: mol_type = other DNA
cgttctgcttcaaagagagccagtttggtgtccgtgtttgtaccggctgtcattcaaccatcaaatatggcgaag

SEQ ID NO: 888543 - DNA, 75 bp, synthetic construct
  source 1..75: mol_type = other DNA
tggcagtggctggcaggcccgtcaggaagcggttcgcttttgtccatacccgggaatggggtttcctgcgagtga

SEQ ID NO: 888544 - DNA, 75 bp, synthetic construct
  source 1..75: mol_type = other DNA
caacgttcgcaattacactggaatatgcggcttccatcatcgcactcgtggctatcttcaaatctttcttcggtc

SEQ ID NO: 888545 - DNA, 75 bp, synthetic construct
  source 1..75: mol_type = other DNA
ggttatgaaaccggaaactacaataaccaagtcagcgatatgtatccggatgcttacgggcagatagtaaacctg

SEQ ID NO: 888546 - DNA, 75 bp, synthetic construct
  source 1..75: mol_type = other DNA
tcggatatccataaccaggcagactataaagccagccataccggaatcagtttatcgggtggctcagggatgtca

SEQ ID NO: 888547 - DNA, 75 bp, synthetic construct
  source 1..75: mol_type = other DNA
actggaaacagttgcttatcgtgtcgatgcttgctgctctggtggccggaggcattgtagcctggaatattcacg

SEQ ID NO: 888548 - DNA, 75 bp, synthetic construct
  source 1..75: mol_type = other DNA
atgatctgggcattcgcaaaagcatactggaaacagttaattatcgtggtgatgcttgctgttctggtcatatcc

SEQ ID NO: 888549 - DNA, 75 bp, synthetic construct
  source 1..75: mol_type = other DNA
ataccgtggtcgtctggataacgtgtttgttaccgtaattggtctgctgaccatcctgaacatcgtatacaaact

SEQ ID NO: 888550 - DNA, 75 bp, synthetic construct
  source 1..75: mol_type = other DNA
tggtgcctcacgatccgcagcctgttattctcccggcccctgcgggtctgtcaaaaaattcacgcatcagcctga

SEQ ID NO: 888551 - DNA, 75 bp, synthetic construct
  source 1..75: mol_type = other DNA
tgccggtattaagaacacatatcctgatgaaatgctgaaagagttggttgaacgcactgaaccgccccgggtttc

SEQ ID NO: 888552 - DNA, 75 bp, synthetic construct
  source 1..75: mol_type = other DNA
gctggcgtaccgctcggcgttatgctacaccaggctctgcgtgacatgggaaaaacctcatggcattacggcatc

SEQ ID NO: 888553 - DNA, 75 bp, synthetic construct
  source 1..75: mol_type = other DNA
gaccgcgcctgtatgtgagcatattgacgatcatgccgttatggccagagagctggctcttgatatggcacacgg

SEQ ID NO: 888554 - DNA, 75 bp, synthetic construct
  source 1..75: mol_type = other DNA
accagcgaacaggaagcacgccagcaatctccggctggctgcgtgatggtattcgctgcccgtattcgtcagggg

SEQ ID NO: 888555 - DNA, 75 bp, synthetic construct
  source 1..75: mol_type = other DNA
agcgcgaagcccgtgagcaatcaccggctggctgcgtgatggtattcgctggccgtctaccagttcaggaggttc

SEQ ID NO: 888556 - DNA, 75 bp, synthetic construct
  source 1..75: mol_type = other DNA
ggagatcgagacaaaggcgaacagtattcgggttcatggcaaaacaacgttaaacgtggtttagaggctccgacg

SEQ ID NO: 888557 - DNA, 75 bp, synthetic construct
  source 1..75: mol_type = other DNA
cgccatcctgaatatgagtccgatacccgagctcaggtgattgctccgttgattgctgcggcgagtggtccactt

SEQ ID NO: 888558 - DNA, 75 bp, synthetic construct
  source 1..75: mol_type = other DNA
actgaaagagggcggacgcaccacaggcgtcgcctatcgactgccagaagagacgctggagcaggaactaaccct

SEQ ID NO: 888559 - DNA, 75 bp, synthetic construct
  source 1..75: mol_type = other DNA
cggcgctggagtttatcgagtcgtgtaccggtacgctggttgggtggcaccgggcgttttgcctgcgtctgaccg

SEQ ID NO: 888560 - DNA, 75 bp, synthetic construct
  source 1..75: mol_type = other DNA
ttgccggtagtgattgctggcgatcttagctggtctggtttccgcccggacatgatcaatcgtctgcatccagcg

SEQ ID NO: 888561 - DNA, 75 bp, synthetic construct
  source 1..75: mol_type = other DNA
tatccggagcagcctcgactggttgtgctggctgacccctgcggatgtgcctggcttgctgccagtgacgatgac

SEQ ID NO: 888562 - DNA, 75 bp, synthetic construct
  source 1..75: mol_type = other DNA
gaaccagagcctacccgctggcacctggatcttttcacccgtgcgcttgattcgggagctgcacgtctggcacgg

SEQ ID NO: 888563 - DNA, 75 bp, synthetic construct
  source 1..75: mol_type = other DNA
tgagctgggattacaaaaccaattgcccctgtaaatttggcagtaaaattatcgtcaacaatctggtgagatggg

SEQ ID NO: 888564 - DNA, 75 bp, synthetic construct
  source 1..75: mol_type = other DNA
gtgcatggaaatattgatataaaggtgtcagatggagattatagccttaatgtgactgggggcggtggtagtttt

SEQ ID NO: 888565 - DNA, 75 bp, synthetic construct
  source 1..75: mol_type = other DNA
tggtgaaattaaaacttggtctggaaaaacaaattcatggtggttgtcatgtggtgaacgtttttgtctgaataa

SEQ ID NO: 888566 - DNA, 75 bp, synthetic construct
  source 1..75: mol_type = other DNA
ataaactgaaacacttacctggtaaaaatctgaagaaatcgaataacggatacatcagtgaatggtctgtctcag

SEQ ID NO: 888567 - DNA, 75 bp, synthetic construct
  source 1..75: mol_type = other DNA
gcaatcctgactatccagttattgttggttcagtgtataatggccagaataaaccgcctttttctctgtctgaga

SEQ ID NO: 888568 - DNA, 75 bp, synthetic construct
  source 1..75: mol_type = other DNA
aagacagtttatttaaacctccacaagtaatgctatataaagaacagaattttctggagtataagattcagtacc

SEQ ID NO: 888569 - DNA, 75 bp, synthetic construct
  source 1..75: mol_type = other DNA
caaatcccggatacatcagtgaatggtctgttacagaaaatctgaaatgtccttctgtaacacttttcggttata

SEQ ID NO: 888570 - DNA, 75 bp, synthetic construct
  source 1..75: mol_type = other DNA
atattatgattttagcagatgatccctcatctcaccctaaagcaacttatgataaactggaatacttacctagtg

SEQ ID NO: 888571 - DNA, 75 bp, synthetic construct
  source 1..75: mol_type = other DNA
ttttaaaagatagtttatttacccccccacaaatcagaatatatgataaacaaaatttgatagagtataagattc

SEQ ID NO: 888572 - DNA, 75 bp, synthetic construct
  source 1..75: mol_type = other DNA
agccttcaggaacaatgagaaagataaaaatagggctggcgctaggatctggcgcggcgcgaggatggtcgcata

SEQ ID NO: 888573 - DNA, 75 bp, synthetic construct
  source 1..75: mol_type = other DNA
aaaagtaatatataattatgatcacagcatgcagcatacctgcattattgtgttacagccagaaatagctgagtt

SEQ ID NO: 888574 - DNA, 75 bp, synthetic construct
  source 1..75: mol_type = other DNA
atggatgcgatgcaaagccaacaaatggctttagaacaccaaagaagacgagaaatgcaactggttgctattcga

SEQ ID NO: 888575 - DNA, 75 bp, synthetic construct
  source 1..75: mol_type = other DNA
agtttattatatttgataattattattctgattctgaagtaaataaactgaaagggctggaggaacaatattcat

SEQ ID NO: 888576 - DNA, 75 bp, synthetic construct
  source 1..75: mol_type = other DNA
attggcagtgaggttctggttagttttatacagggtaaccctgactatccagttatcgttggtacagtgtataac

SEQ ID NO: 888577 - DNA, 75 bp, synthetic construct
  source 1..75: mol_type = other DNA
ggtgatatcattgcacagaaagatgtatggctgcagccaggtggttcagtggccgtggatatgcctctggatgat

SEQ ID NO: 888578 - DNA, 75 bp, synthetic construct
  source 1..75: mol_type = other DNA
gggattacttcttcagttgaaggtgtggaaacctgtggagtcatattagagttatgtcgctattcatttttggac

SEQ ID NO: 888579 - DNA, 75 bp, synthetic construct
  source 1..75: mol_type = other DNA
tggcatctcgatatctggggaaagaatcgggcggaggttactgcccgcctgggtacggttaaagcacgggcggcg

SEQ ID NO: 888580 - DNA, 75 bp, synthetic construct
  source 1..75: mol_type = other DNA
cgcaggatggtgtacaactggatcgcaacggcaaaccggtgaccggtgcagcagctgcgaccaatggcactggca

SEQ ID NO: 888581 - DNA, 75 bp, synthetic construct
  source 1..75: mol_type = other DNA
acaggcagtctacaccctgccggagaatgccaccctggtcgggagccgggcaatgacggccctgctggggcgggt

SEQ ID NO: 888582 - DNA, 75 bp, synthetic construct
  source 1..75: mol_type = other DNA
atgaatcgtgattccttttatccagccatcgcctgttttccgctgttactgatgctggccgggtgtgcgcctatg

SEQ ID NO: 888583 - DNA, 75 bp, synthetic construct
  source 1..75: mol_type = other DNA
cacgcctatcgcctcaattgttgacgagaagctggttgcgccaaacgccaaaaataacgactttggcaatgaatg

SEQ ID NO: 888584 - DNA, 75 bp, synthetic construct
  source 1..75: mol_type = other DNA
acgtctttttttgtgcctaaaatccagtatccgcaaggctttcctcgctttttcactcaacctaagtcaacctga

SEQ ID NO: 888585 - DNA, 75 bp, synthetic construct
  source 1..75: mol_type = other DNA
aagggcaggtatcagcagaggttaaagctgccacgcttaagcttgaaggtcaggcgacatctgaagttaaaggca

SEQ ID NO: 888586 - DNA, 75 bp, synthetic construct
  source 1..75: mol_type = other DNA
agccgggatgagcttgagccggacacgccccgtcttattgaagtatccggtaacaccctgacgctgttaccggtg

SEQ ID NO: 888587 - DNA, 75 bp, synthetic construct
  source 1..75: mol_type = other DNA
agccgggatgagcttgagctggacacgccccgtcttattgaagtatccggtaacactctgacgctgttaccggta

SEQ ID NO: 888588 - DNA, 75 bp, synthetic construct
  source 1..75: mol_type = other DNA
aaccgcatcaggccatcgtaatggaagccaacgcgacctcaccgaccggcgcaccgaagctgaaaagcgtcatca

SEQ ID NO: 888589 - DNA, 75 bp, synthetic construct
  source 1..75: mol_type = other DNA
atatcgcgaaataatgccggaaacagagatcgaaaattgttcccgtcgcttcgcggctgttgccaccaatttaag

SEQ ID NO: 888590 - DNA, 75 bp, synthetic construct
  source 1..75: mol_type = other DNA
ggagattgcggaaatatcccgcgctctcaagtcgctggggaaagaacttggatgccctgtgctcgcactgtcgca

SEQ ID NO: 888591 - DNA, 75 bp, synthetic construct
  source 1..75: mol_type = other DNA
agccgttcgacctcatcacgctgagtgagcatattgagaaaatgcacaatattgaggcactgggcggcttcgctt

SEQ ID NO: 888592 - DNA, 75 bp, synthetic construct
  source 1..75: mol_type = other DNA
aacgccggcgggatgacgggcacgcccacgggatttgatgaactggatgagatgacctgtggtctgcagcccggc

SEQ ID NO: 888593 - DNA, 75 bp, synthetic construct
  source 1..75: mol_type = other DNA
ctataacgcagacgggtcagtgacgataaaaacccataatgttgctgctgtcgaaaaagtcgtcgcgaaattaaa

SEQ ID NO: 888594 - DNA, 75 bp, synthetic construct
  source 1..75: mol_type = other DNA
atggctgagctggtcggtgaaagtctgccgctggatctgattacgctttctgaccggatggagaatgctggtttg

SEQ ID NO: 888595 - DNA, 75 bp, synthetic construct
  source 1..75: mol_type = other DNA
ttccgcgcccgtccccgccgttatgtccgtaagtacggcaatcccgccctcattatggtcgactacctgcaactg

SEQ ID NO: 888596 - DNA, 75 bp, synthetic construct
  source 1..75: mol_type = other DNA
aaagagcttatgagcgtctcaccttctgattatcggccaactggctaccctgtttgcagggcgaatggaggacaa

SEQ ID NO: 888597 - DNA, 75 bp, synthetic construct
  source 1..75: mol_type = other DNA
atgatgcatcagaagaggaagattctggggattccgatttgcctgattcattagataaggacttacctacacacg

SEQ ID NO: 888598 - DNA, 75 bp, synthetic construct
  source 1..75: mol_type = other DNA
tactgaaagaggtgcaggattttcgcgactgtgtaaaacgagttgtagcgatgctttcaggtaaacaaatacctg

SEQ ID NO: 888599 - DNA, 75 bp, synthetic construct
  source 1..75: mol_type = other DNA
agagcaatgaagttgacttttaaaatcaaaactataaacccattaatcactttttatacaagatatctccggggg

SEQ ID NO: 888600 - DNA, 75 bp, synthetic construct
  source 1..75: mol_type = other DNA
cccgctggctgacactcatcggtacaatcattacccagtttgcgctggggtcggtttatacctggagcctgttta

SEQ ID NO: 888601 - DNA, 75 bp, synthetic construct
  source 1..75: mol_type = other DNA
tcaggagacaccccagaatccgatgctatcggcatgaaatcaagtgactctgacaccgatggtgatgacggtgag

SEQ ID NO: 888602 - DNA, 75 bp, synthetic construct
  source 1..75: mol_type = other DNA
ccaggtggggtcaattagcgatgcctcacaaggcgtattccagatctttgccagtggcagtgatgaagatgatcc

SEQ ID NO: 888603 - DNA, 75 bp, synthetic construct
  source 1..75: mol_type = other DNA
tggcacctgcactgattaaacgtaatgctattggatacgaaagcgcttcacagttgctgatcactgccggagaca

SEQ ID NO: 888604 - DNA, 75 bp, synthetic construct
  source 1..75: mol_type = other DNA
tgggggatatcccggtactggggcatctttttcgcgcaaaaagcgaacagacagctaagcgtaatctgatgctgt

SEQ ID NO: 888605 - DNA, 75 bp, synthetic construct
  source 1..75: mol_type = other DNA
gaggaacagctcaagctatcccgagatcgggacgatacgacttttcggaaagtgaaaacggcgattgctgcgttt

SEQ ID NO: 888606 - DNA, 75 bp, synthetic construct
  source 1..75: mol_type = other DNA
ggattatctggacgcactggaactggtcgatacttccggtgcgccagatattgaatggcctacgcctccggcagt

SEQ ID NO: 888607 - DNA, 75 bp, synthetic construct
  source 1..75: mol_type = other DNA
gctgatcacggcaggagacaatccccaacgattaagatcagaatcaggttttgcggcactgtgtggtgtcagccc

SEQ ID NO: 888608 - DNA, 75 bp, synthetic construct
  source 1..75: mol_type = other DNA
gtgcccgtttgggatgatcaccattcagtcattgccgggggatacccggcaacaaatcgtgaaatgcgatctctg

SEQ ID NO: 888609 - DNA, 75 bp, synthetic construct
  source 1..75: mol_type = other DNA
ccggcgatcctgcgctcccgggtgagaaaaaacatccgtaaatacggtcatccatccatgatcctgctggactat

SEQ ID NO: 888610 - DNA, 75 bp, synthetic construct
  source 1..75: mol_type = other DNA
agagcacctggaacatcagggcaggctggacgtactgggcggttttgcttatctggccgagctcagcaagaacac

SEQ ID NO: 888611 - DNA, 75 bp, synthetic construct
  source 1..75: mol_type = other DNA
acggaggcatggatgcgctgggtgaacgcctgataattgatgactgcagccagcagacaccgtcatcgctgcgtg

SEQ ID NO: 888612 - DNA, 75 bp, synthetic construct
  source 1..75: mol_type = other DNA
agcagtgtttctacacaaagctcggtttcgacatcttccatttccactggtttttcaatgaatatattacccaga

SEQ ID NO: 888613 - DNA, 75 bp, synthetic construct
  source 1..75: mol_type = other DNA
cgagtaaaataactgctaataattctgttggaggcgcgggcagtgggagttccggaggcggtaatagttcatccg

SEQ ID NO: 888614 - DNA, 75 bp, synthetic construct
  source 1..75: mol_type = other DNA
ggaaatctcccgctcactcaaagcgctggctaaagaaattggctgtccggtagtggcgttgtcacagctcaaccg

SEQ ID NO: 888615 - DNA, 75 bp, synthetic construct
  source 1..75: mol_type = other DNA
aagacgattatcataacttcgatgctctgaacattcctggtcaccacccggcgcgcgctgaccacgacactttct

SEQ ID NO: 888616 - DNA, 75 bp, synthetic construct
  source 1..75: mol_type = other DNA
gcatcgacccggaagtttactctggtttcgccttcgggatggggatggagcgtctgaccatgttgcgttacggcg

SEQ ID NO: 888617 - DNA, 75 bp, synthetic construct
  source 1..75: mol_type = other DNA
tctttgaagaagatttgcagattcgtttccgtccttcttatttcccgttcaccgaaccgtctgcagaagttgacg

SEQ ID NO: 888618 - DNA, 75 bp, synthetic construct
  source 1..75: mol_type = other DNA
tggttccccatggctggagcgtggatattcctgcaatgttgctggcagctcaggggaaaaaaatggccgccatgt

SEQ ID NO: 888619 - DNA, 75 bp, synthetic construct
  source 1..75: mol_type = other DNA
atgttgcgttacggcgtcaccgacctgcgttcattcttcgaaaacgatctgcgttccctcaaacagtttaaataa

SEQ ID NO: 888620 - DNA, 75 bp, synthetic construct
  source 1..75: mol_type = other DNA
ttatcaacgaagcaaaagagcaggtgcagcaggcgctgaatgcgcgtaaagccgagctggaaagcgcggcgttga

SEQ ID NO: 888621 - DNA, 75 bp, synthetic construct
  source 1..75: mol_type = other DNA
tggaaattttggtggggccacatccggaacagtatgtctgggttttaaaattgttaaaaacacgcaaatcaaacg

SEQ ID NO: 888622 - DNA, 75 bp, synthetic construct
  source 1..75: mol_type = other DNA
ggttgaacgttacaatctggcacagcagcctatgagctttgttcagaacgagaaagcgaaagcattcctggaagc

SEQ ID NO: 888623 - DNA, 75 bp, synthetic construct
  source 1..75: mol_type = other DNA
tgaactggctcgctggtttggtataccgctggaaaaggtgggtttagcttccaccagttgctgtggtggtaaaac

SEQ ID NO: 888624 - DNA, 75 bp, synthetic construct
  source 1..75: mol_type = other DNA
aacaccttcgtcccttccggggtatcctgcaagcagatgcgttcgcaggttacgatcggctgttcagtgccgaac

SEQ ID NO: 888625 - DNA, 75 bp, synthetic construct
  source 1..75: mol_type = other DNA
agatgaaaataatggctaatcttggattggagtgttcatttgatatttatttcgtcggcaatgaagatggcaatc

SEQ ID NO: 888626 - DNA, 75 bp, synthetic construct
  source 1..75: mol_type = other DNA
attttgccggaggacctgagtacaaaactctcagatttgttccctataggggcaccagacagttcgatcagcagc

SEQ ID NO: 888627 - DNA, 75 bp, synthetic construct
  source 1..75: mol_type = other DNA
gtaaaatggtctgaaaacgcgcgcattggttactacgctcaggaccacgaatatgagtttgaaaatgatctgacc

SEQ ID NO: 888628 - DNA, 75 bp, synthetic construct
  source 1..75: mol_type = other DNA
gacgcgatgaactgagctgcatcctaggtgacggagccgtgcccttggacaacaatatctgcgagcgagctatac

SEQ ID NO: 888629 - DNA, 75 bp, synthetic construct
  source 1..75: mol_type = other DNA
aacaatgaggtcagcgtttccatttccaccctggagaatgttgcatccgcattcgggcgtcacggatatgaatta

SEQ ID NO: 888630 - DNA, 75 bp, synthetic construct
  source 1..75: mol_type = other DNA
ccaggtgacaatcagccgcctgttaaacaatgaagtcagcgtttccatttccaccctggagaatgttgcatccgc

SEQ ID NO: 888631 - DNA, 75 bp, synthetic construct
  source 1..75: mol_type = other DNA
tgaaatcatgttcgcccaggcgggctccggccagtggcaggcgttcaccgatgcggactatgcgcgcctgcgcat

SEQ ID NO: 888632 - DNA, 75 bp, synthetic construct
  source 1..75: mol_type = other DNA
gtctgccggacgaacctccggcggttactgcagaccagctcgaaacgctttggcagcgccttgctgaacagctac

SEQ ID NO: 888633 - DNA, 75 bp, synthetic construct
  source 1..75: mol_type = other DNA
taagcgcctcggcggcatccagttccgcgatgctgagcggctcggtgcgagtgtccacgagcagtacacgattaa

SEQ ID NO: 888634 - DNA, 75 bp, synthetic construct
  source 1..75: mol_type = other DNA
gcgctggtgaactgttgcttggcgtgggaattccagtggaacagcactacggcccgatgagtgaagttgctcctg

SEQ ID NO: 888635 - DNA, 75 bp, synthetic construct
  source 1..75: mol_type = other DNA
atggacggttactctgcggaagctcgcgctggtgaactgttgcttggcgtgggaattccagtggaacagcactac

SEQ ID NO: 888636 - DNA, 75 bp, synthetic construct
  source 1..75: mol_type = other DNA
tttcctggttgcgtgagaagcatcagacctggcgtctgtgctatttgttgggtgaggctggaagtggaaaaaccc

SEQ ID NO: 888637 - DNA, 75 bp, synthetic construct
  source 1..75: mol_type = other DNA
atgctctttccgcaacagaaagcgattgattcaccggaagcgaaaagcaagtcggaagagctggaagatgaaccc

SEQ ID NO: 888638 - DNA, 75 bp, synthetic construct
  source 1..75: mol_type = other DNA
cgagcgtaaattcctcattgctgatggcgtgaaaatcggagtgaacaaggtggtttctcagtggattagccaggg

SEQ ID NO: 888639 - DNA, 75 bp, synthetic construct
  source 1..75: mol_type = other DNA
gggaaacgctgcatcaagggttgagcgcagtctcactatcacagcgctggctcgccgcacggggtgacacccttt

SEQ ID NO: 888640 - DNA, 75 bp, synthetic construct
  source 1..75: mol_type = other DNA
gtaccatcaaagacctgatggaaggggcgcgaggtgtcgggactaactacggcgtcgggctggatgaacagctgg

SEQ ID NO: 888641 - DNA, 75 bp, synthetic construct
  source 1..75: mol_type = other DNA
atggccataaaaggcgcgttatcgccggctatcgaaatgtacgacgcgctgaatgatgccgccgcaaaagggatt

SEQ ID NO: 888642 - DNA, 75 bp, synthetic construct
  source 1..75: mol_type = other DNA
gataacagccggaaaattggtgaagtgcatttccataccaaagaagcactttctccatcccagcttatggaatgg

SEQ ID NO: 888643 - DNA, 75 bp, synthetic construct
  source 1..75: mol_type = other DNA
ccgtgctggttaaaaccggtgaaacggtggtcctgggcggattgctggatgatttttctaaagagcaagtgtcaa

SEQ ID NO: 888644 - DNA, 75 bp, synthetic construct
  source 1..75: mol_type = other DNA
atggaaatggactaaacctgggcgtgcaatgggcgaataaaaacgttggcgcacagcaatttaccaataccggat

SEQ ID NO: 888645 - DNA, 75 bp, synthetic construct
  source 1..75: mol_type = other DNA
tgctaactggtgtttccgaaaagctgaaagatgaaaaagggaatacgcgtaagccttcttctacttctgcgatgg

SEQ ID NO: 888646 - DNA, 75 bp, synthetic construct
  source 1..75: mol_type = other DNA
agtggcacccgtaagtccaatgctgccacatacctgcccaccattttcggtctgtctgccgcgggggcggccggt

SEQ ID NO: 888647 - DNA, 75 bp, synthetic construct
  source 1..75: mol_type = other DNA
cagttacagaacgagcagaacgccctgatggcaaaggtgcagtccctgacggagcagctggcgcaacaggggggc

SEQ ID NO: 888648 - DNA, 75 bp, synthetic construct
  source 1..75: mol_type = other DNA
cgggcggcgctggggaaagccatttccggcggtatatctgaaaccacggactggatcaaacaacgctacgggatg

SEQ ID NO: 888649 - DNA, 75 bp, synthetic construct
  source 1..75: mol_type = other DNA
ataaaggtggtatcagcaaaacaatcagcagcaacagtaaatccgtaaccgataacagccggaaaattggtgaag

SEQ ID NO: 888650 - DNA, 75 bp, synthetic construct
  source 1..75: mol_type = other DNA
ggaaatggcacaaaaaatggttaagccgtgggatcgctttgtgcaaatcctgaaagccattcagaccgtgatcgg

SEQ ID NO: 888651 - DNA, 75 bp, synthetic construct
  source 1..75: mol_type = other DNA
ggtggccaatatcgtgatgggggcttcccggttcatcatgattgggttacgtggggtctgggctgcgctgacggc

SEQ ID NO: 888652 - DNA, 75 bp, synthetic construct
  source 1..75: mol_type = other DNA
tgcttagctttgccgccgtgggtgcagtggtcaacatcctgatgggtgtttctgctttcgttatgggtggcctgc

SEQ ID NO: 888653 - DNA, 75 bp, synthetic construct
  source 1..75: mol_type = other DNA
gattatttccacgctcaccgccgacgtcattgatgagtcaacgctcaaccaggcggattactggcgccgacacat

SEQ ID NO: 888654 - DNA, 75 bp, synthetic construct
  source 1..75: mol_type = other DNA
acgaagacacgctgatgccgctggctcgccagtttgagctggatctcgccgccaacaacggtacgcaacatacgg

SEQ ID NO: 888655 - DNA, 75 bp, synthetic construct
  source 1..75: mol_type = other DNA
ggcaccaccgcgtggctgctgccggaactcaacggcgttccggcactggagtaccatttcaccgatatctcggcg

SEQ ID NO: 888656 - DNA, 75 bp, synthetic construct
  source 1..75: mol_type = other DNA
ccgcctgtagcgaaatgctcacgccgtcactgcgcgaagcgatgtttaaccccgattcggcgcagctggacaata

SEQ ID NO: 888657 - DNA, 75 bp, synthetic construct
  source 1..75: mol_type = other DNA
tctgattgcgcaggtcagcccgaacggtttaacgccccgctggcaggaggcctggcgtctgctttcacagcgtca

SEQ ID NO: 888658 - DNA, 75 bp, synthetic construct
  source 1..75: mol_type = other DNA
gcgcccgcgtttttctggaggtggggcccgatgcccagttggttgcttgcgggcagcgcgaataccgcgataacg

SEQ ID NO: 888659 - DNA, 75 bp, synthetic construct
  source 1..75: mol_type = other DNA
gaagccgcacaaacaaccgcacatgatgccgcacatgatgaagccagtaatggcgcggctttcagcgtacatgcc

SEQ ID NO: 888660 - DNA, 75 bp, synthetic construct
  source 1..75: mol_type = other DNA
gagatatttattttgaaaaagccctgcgagaggtatttggaaccgtaagcagtcgaatcagatatatagaagatg

SEQ ID NO: 888661 - DNA, 75 bp, synthetic construct
  source 1..75: mol_type = other DNA
tcaaagccacctccgcggatacggcggagtttatggggcaaatgttcggcaacttctcgtcagatgctgagcggc

SEQ ID NO: 888662 - DNA, 75 bp, synthetic construct
  source 1..75: mol_type = other DNA
ttcgcacagtatgtggctgatacgcacacgccagaaattcaggctgcacgcggtcgcaagggcggttctaagtct

SEQ ID NO: 888663 - DNA, 75 bp, synthetic construct
  source 1..75: mol_type = other DNA
gatctttcagttgaggagtttctcgaagatttccttgaacatcccgagtggtttgctggtttcgatcaaaaccct

SEQ ID NO: 888664 - DNA, 75 bp, synthetic construct
  source 1..75: mol_type = other DNA
atgcttatgtaacccaaaaagtatcgccccgatatgcaattgaaagatttgatagaactgataagaatgggaggc

SEQ ID NO: 888665 - DNA, 75 bp, synthetic construct
  source 1..75: mol_type = other DNA
tgggtggcctgatgctgaccatcggcgcagtgctcggccagatggcacttgttcgcctcagcttcaccacgttgg

SEQ ID NO: 888666 - DNA, 75 bp, synthetic construct
  source 1..75: mol_type = other DNA
gggtggcattcagcgccctgaataatatgtcccgccctgtcaacgcggcgcgccagagtgccgccgcgttggcgt

SEQ ID NO: 888667 - DNA, 75 bp, synthetic construct
  source 1..75: mol_type = other DNA
gctcgaattaacccacggcaccgcgtcgaaaggatccatgaagcgggaatccgatattgataaagattccctttc

SEQ ID NO: 888668 - DNA, 75 bp, synthetic construct
  source 1..75: mol_type = other DNA
atgcgcatagttaccgctgccgtcatggcctcaacgctggcagtcagttcattaagccacgctgctgaagtcggt

SEQ ID NO: 888669 - DNA, 75 bp, synthetic construct
  source 1..75: mol_type = other DNA
ggcgcggttaacgcattcagttcagcaggggaaacgctccgcgaaccgctgatggatatcatgcttaccgtcagt

SEQ ID NO: 888670 - DNA, 75 bp, synthetic construct
  source 1..75: mol_type = other DNA
caaaaagccgatctgctggcttttgccagcatggcggcaaaggcttcggtagcctttgaactgcccgccgatcag

SEQ ID NO: 888671 - DNA, 75 bp, synthetic construct
  source 1..75: mol_type = other DNA
gcggtgtgaacattacgctgggcctgccctttattcgcacatcagtggaccacggcaccgcgcttgaactggcgg

SEQ ID NO: 888672 - DNA, 75 bp, synthetic construct
  source 1..75: mol_type = other DNA
tttgccagcgaacgcattgaccaggtctatctggcggcggcgaaagtgggcggcattgttgccaacaacacctat

SEQ ID NO: 888673 - DNA, 75 bp, synthetic construct
  source 1..75: mol_type = other DNA
cgggatcaaactgtgcgaatcatacaaccgccagtatggacgcgattaccgctcagtcatgccgaccaacctgta

SEQ ID NO: 888674 - DNA, 75 bp, synthetic construct
  source 1..75: mol_type = other DNA
cgtggcgaagccgatgtaggcagttttattacggcgcttaatctcgccatcaaaatgattgttaacacccaatga

SEQ ID NO: 888675 - DNA, 75 bp, synthetic construct
  source 1..75: mol_type = other DNA
taccggccccgtgcataaaggcgtcattaacgacgctggtattccctttaccggtcataccgagtttttcgaaga

SEQ ID NO: 888676 - DNA, 75 bp, synthetic construct
  source 1..75: mol_type = other DNA
ccggtcgaactggttgtttgtgccgatgccttttttacttctccttaccgaccggggctagcgatgctcggtttg

SEQ ID NO: 888677 - DNA, 75 bp, synthetic construct
  source 1..75: mol_type = other DNA
tcaggcgataactggcatccgggtgaagaacttacgcagcgcaggacgcagcgcagtacgcagagccatatgttc

SEQ ID NO: 888678 - DNA, 75 bp, synthetic construct
  source 1..75: mol_type = other DNA
aattctgtttatggtggggcaactgtaaacatgggggcaggagatgatactgtcattgtccatggtgcattatat

SEQ ID NO: 888679 - DNA, 75 bp, synthetic construct
  source 1..75: mol_type = other DNA
gagcatgacagttacgcaatcagtgaaaagagtcacggcagagaagaaatccgtcttcatattgtttgcgatgtc

SEQ ID NO: 888680 - DNA, 75 bp, synthetic construct
  source 1..75: mol_type = other DNA
taatattttgacgaatgataaggtattcaaggcagggttaagacgtaagatgcgaaaagcagccatggacaggaa

SEQ ID NO: 888681 - DNA, 75 bp, synthetic construct
  source 1..75: mol_type = other DNA
ggagcaggaagtttaggaacatttactgcaacagctacaaccgccaaagcaactgcgttagatggcactgagcat

SEQ ID NO: 888682 - DNA, 75 bp, synthetic construct
  source 1..75: mol_type = other DNA
gcaggcagaggtcacgttgccggcaggcacggcagaaggtgcagttattacacttaccgtgacccgtccggacaa

SEQ ID NO: 888683 - DNA, 75 bp, synthetic construct
  source 1..75: mol_type = other DNA
agatccggctggtaatgaaagtgctccggtcactgtgacgtcaaaaactgatgtattaccaacagtgagtatcag

SEQ ID NO: 888684 - DNA, 75 bp, synthetic construct
  source 1..75: mol_type = other DNA
aaaaattatgcgtggcagtctcctttcgctcaataatagcagagcaaaagaaagagcccgaaatgatggtcagat

SEQ ID NO: 888685 - DNA, 75 bp, synthetic construct
  source 1..75: mol_type = other DNA
tagcagagcaaaagaaagagcccgaaatgatggtcagatattatatcagttctgctgatttaaccgctgagaagt

SEQ ID NO: 888686 - DNA, 75 bp, synthetic construct
  source 1..75: mol_type = other DNA
tgcgagatcttatgcaacaggcccggcacgaacagccgcctgttaatgttagcgaactggagacaatgcatcgcc

SEQ ID NO: 888687 - DNA, 75 bp, synthetic construct
  source 1..75: mol_type = other DNA
tgttcgcggatgtttatctgctgacaaccaaggtcgatattcttggtgtctatctctacaaaaccgcctttgcct

SEQ ID NO: 888688 - DNA, 75 bp, synthetic construct
  source 1..75: mol_type = other DNA
tctggcactcgctgtggatgacggtctggtataccgcgctggtggtggcgggcagcaccgtgctcgggctggccg

SEQ ID NO: 888689 - DNA, 75 bp, synthetic construct
  source 1..75: mol_type = other DNA
tttttcaatgttgatggtgtacgcagcattgatacaggcaccgcaatgactaagcctcagcgccaggttaactcc

SEQ ID NO: 888690 - DNA, 75 bp, synthetic construct
  source 1..75: mol_type = other DNA
atgccaaactggtgctcgaatcgtatgtatttttctggtgaaccggcacagatggctgagattaaacgactggcc

SEQ ID NO: 888691 - DNA, 75 bp, synthetic construct
  source 1..75: mol_type = other DNA
cattaacgtcggcacgggcgttgactgcactatccgcgagctggcgcaaaccatcgccaaagtggtgggttacaa

SEQ ID NO: 888692 - DNA, 75 bp, synthetic construct
  source 1..75: mol_type = other DNA
cattaacgttggtacgggcgttgactgcactatccgcgagctggcgcaaaccatcgccaaagtggtgggttacaa

SEQ ID NO: 888693 - DNA, 75 bp, synthetic construct
  source 1..75: mol_type = other DNA
tgctggatgtgacgcgcctgcatcagcttggctggtatcacgaaatctcactggaagcggggcttgcaagcactt

SEQ ID NO: 888694 - DNA, 75 bp, synthetic construct
  source 1..75: mol_type = other DNA
atggaaccccttcgtgaaataagaaatcggctgcttaacggctggcaattatcaaaaatgcatacttttgaagtg

SEQ ID NO: 888695 - DNA, 75 bp, synthetic construct
  source 1..75: mol_type = other DNA
gacagtgtacgccagcccgtcgcccttttctgatgaacgcccttcaagccgctttcgcggcataaccttgccgtc

SEQ ID NO: 888696 - DNA, 75 bp, synthetic construct
  source 1..75: mol_type = other DNA
tctttattggtggtctgacctataaaattacgattgcggtcataaaaaatattagcgcaaaattatttttgcttg

SEQ ID NO: 888697 - DNA, 75 bp, synthetic construct
  source 1..75: mol_type = other DNA
accatcactgtgcatttcaccgcaaaaagaggtgactggtgtgacatctggggtaacgaggatatatcggtgtgg

SEQ ID NO: 888698 - DNA, 75 bp, synthetic construct
  source 1..75: mol_type = other DNA
atgaactctggctgcagagcggtactggacagcgtcgctgggaaggattaccggacgatgtcagggataccatca

SEQ ID NO: 888699 - DNA, 75 bp, synthetic construct
  source 1..75: mol_type = other DNA
attaagcaggcgcttgcgtatgaattattattgcacttaaaaaatttttaccctgtttttcctgaatcgctagtg

SEQ ID NO: 888700 - DNA, 75 bp, synthetic construct
  source 1..75: mol_type = other DNA
ccttctaattcgcatgtaattcctgcattactacgccgttttcatgaagcaaagttagaaggtctaccacaagtt

SEQ ID NO: 888701 - DNA, 75 bp, synthetic construct
  source 1..75: mol_type = other DNA
atgtatttttctggtgaaccggcacagatcgctgagattaaacgactggccagcggtgcagtcacaccgctttat

SEQ ID NO: 888702 - DNA, 75 bp, synthetic construct
  source 1..75: mol_type = other DNA
tggcgcggctttcagcgtacatgccacacatgaagccgcacaaacaaccgcacatgatgccgcacatcatgaaca

SEQ ID NO: 888703 - DNA, 75 bp, synthetic construct
  source 1..75: mol_type = other DNA
gatccttgatattaaaaatcaggagttatcgggaaccttaaccttgtattctcgtccctctatcgcgcaatgctg

SEQ ID NO: 888704 - DNA, 75 bp, synthetic construct
  source 1..75: mol_type = other DNA
tacgaatccttcctgaacgcctacaacaccgaagtcggtgacagactgccacacgctgttgcggtcaacgagaaa

SEQ ID NO: 888705 - DNA, 75 bp, synthetic construct
  source 1..75: mol_type = other DNA
aaagcaacgttgttgcagaattaagccgccgtttcggctgcacgctggagcactggtacgccgaacagggctgca

SEQ ID NO: 888706 - DNA, 75 bp, synthetic construct
  source 1..75: mol_type = other DNA
tccccgacagatgacgatgagctgccggaagtcaccggacctgcgtggatagtcgacaatgtggcgcattatggc

SEQ ID NO: 888707 - DNA, 75 bp, synthetic construct
  source 1..75: mol_type = other DNA
ttccccgacagatgacgatgagctgccggaagtcaccggacctgcgtggatagtcgacaaggtggcgcattatgg

SEQ ID NO: 888708 - DNA, 75 bp, synthetic construct
  source 1..75: mol_type = other DNA
gtggtgtcagccggaaagcgacgttgttgcagaattaagccgccgtttcggctgcacgctggagcactggtacgc

SEQ ID NO: 888709 - DNA, 75 bp, synthetic construct
  source 1..75: mol_type = other DNA
aggattaccggatgatgtcagggaaaccatcactgtgcatttcaccgcaaaaagaggtgactggtgtgatatctg

SEQ ID NO: 888710 - DNA, 75 bp, synthetic construct
  source 1..75: mol_type = other DNA
ggctgacatacctgcaggacggtgtactgctggatgagcaaaactgcctgatgctgcatgaactctggctgcaga

SEQ ID NO: 888711 - DNA, 75 bp, synthetic construct
  source 1..75: mol_type = other DNA
atgccaaactggtgctcgaatcgtatgtatttttctgccgaaccggcacagattgctgagattaaacgactggcc

SEQ ID NO: 888712 - DNA, 75 bp, synthetic construct
  source 1..75: mol_type = other DNA
cgccgtcagcgcaactgactcatcactttctgatggatgaagaaatcctgcctgtatgtagcccggaatacgctc

SEQ ID NO: 888713 - DNA, 75 bp, synthetic construct
  source 1..75: mol_type = other DNA
cagggcacgctggagccgactaacgagccttatgccattgccaaaatcgccgggatcaaactgtgcgaatcttac

SEQ ID NO: 888714 - DNA, 75 bp, synthetic construct
  source 1..75: mol_type = other DNA
gagtaacgaggatgtatcggtgtggtggaaccgtcagtgtgacaacgtcctgccggaaaaaccatgccgtttgac

SEQ ID NO: 888715 - DNA, 75 bp, synthetic construct
  source 1..75: mol_type = other DNA
tttaccgctcccggctggcgtcggtgacagtgtacgccagcccgtcgcccttttctgatgaacgcccttcaagcc

SEQ ID NO: 888716 - DNA, 75 bp, synthetic construct
  source 1..75: mol_type = other DNA
tggcgacatgcggcaaacagccgggtaaaccgtcgtccgtccacgcagtttctgggaccggaaaacgacatgctg

SEQ ID NO: 888717 - DNA, 75 bp, synthetic construct
  source 1..75: mol_type = other DNA
caatacgcaatgctggaagcgataattgaatttttacgtgaggagtgctgcgtaaacagcaaaacagatggcgaa

SEQ ID NO: 888718 - DNA, 75 bp, synthetic construct
  source 1..75: mol_type = other DNA
tagggctggtcaaacaaaaccgtgagagtcggacgctgatgtgtgtttcgcaatacgcaatgctggaagcgataa

SEQ ID NO: 888719 - DNA, 75 bp, synthetic construct
  source 1..75: mol_type = other DNA
tcagtgcgcaactgaataatctgcaggacacagcaacgtctgccttaagcgatatcagtaaagcggtgggagggc

SEQ ID NO: 888720 - DNA, 75 bp, synthetic construct
  source 1..75: mol_type = other DNA
tgtttatgctgcgcaccgtgccgtatcaggagctgcagtatcagcgcagctggcgacatgcggcaaacagccggg

SEQ ID NO: 888721 - DNA, 75 bp, synthetic construct
  source 1..75: mol_type = other DNA
tcagtgcgcagctgaataatctgcagggaacggcaacatctgccttaagcgatatcagtaaaacggtgggagggc

SEQ ID NO: 888722 - DNA, 75 bp, synthetic construct
  source 1..75: mol_type = other DNA
ggcggcggcgagcattcatgtgatggagctggcgcacgaagtctggctggagaacacccagccgatgctgtcgca

SEQ ID NO: 888723 - DNA, 75 bp, synthetic construct
  source 1..75: mol_type = other DNA
cgggatcaaactgtgcgaatcttacaatcgccagtacggacgagattaccgttcagtcatgccgaccaacctgta

SEQ ID NO: 888724 - DNA, 75 bp, synthetic construct
  source 1..75: mol_type = other DNA
cgcggcgcatacgcacaacgtgaataagctgctgtttctcggttcatcgtgcatctatccgaaaatggctaacca

SEQ ID NO: 888725 - DNA, 75 bp, synthetic construct
  source 1..75: mol_type = other DNA
tgtttatgctgcgcaccgttccgtatcaggaactgcagtatcaacgcagctggcgacatgcggcaaacagtcggg

SEQ ID NO: 888726 - DNA, 75 bp, synthetic construct
  source 1..75: mol_type = other DNA
gtatgtgattgagggactgaatcagaccaaaacggagtttttccgcgacggtatgccgcgccggattgagttcac

SEQ ID NO: 888727 - DNA, 75 bp, synthetic construct
  source 1..75: mol_type = other DNA
tgagtgaccagctcagcaacctgcaggattctgcagcctctgcaattgggggaattaaaaacacagttggagggt

SEQ ID NO: 888728 - DNA, 75 bp, synthetic construct
  source 1..75: mol_type = other DNA
atagtacgccaataaaagtttattgtttgccagaggaaaaagcgcgaatccaggaaaatgcggaagcatctggct

SEQ ID NO: 888729 - DNA, 75 bp, synthetic construct
  source 1..75: mol_type = other DNA
tacatggcccactgggccagcgacatttgcgagaaattctaagcgcgcagtttagtggcttgatcctctacccag

SEQ ID NO: 888730 - DNA, 75 bp, synthetic construct
  source 1..75: mol_type = other DNA
attcctgcgtaaaattattaatcacaatctcccagttaaaaactcagccatagaaaacaccatagagaacatgta

SEQ ID NO: 888731 - DNA, 75 bp, synthetic construct
  source 1..75: mol_type = other DNA
gcaggctttagaagagcgtcgtttgatcagtagtaagttatcacttaacgaaaaaaacaagttaaaacatgacgg

SEQ ID NO: 888732 - DNA, 75 bp, synthetic construct
  source 1..75: mol_type = other DNA
aggaaaaagaagagattcgacactctgattcacctgagggattagtggtagccgcagcaaataacagggcgttcg

SEQ ID NO: 888733 - DNA, 75 bp, synthetic construct
  source 1..75: mol_type = other DNA
gccgaagctgatgatgccggattgctgggaagattttcagtcgatctgaaggttgcccagtggcgctggctgtat

SEQ ID NO: 888734 - DNA, 75 bp, synthetic construct
  source 1..75: mol_type = other DNA
taacgagtccggaggagtcgacaccgcagttatttattcgggtaagaaaggcgatctgagtatctatcctggccc

SEQ ID NO: 888735 - DNA, 75 bp, synthetic construct
  source 1..75: mol_type = other DNA
ccgctgggtgcctggctggatgtgtgcaccacgtccacagatggatgccactgaacacaccactaacctggctga

SEQ ID NO: 888736 - DNA, 75 bp, synthetic construct
  source 1..75: mol_type = other DNA
gcaaacttcttcggacacctgaaaaagccgcagattatcgcagccctgaatgatgccggactgtccggtgccgca

SEQ ID NO: 888737 - DNA, 75 bp, synthetic construct
  source 1..75: mol_type = other DNA
agcaagtaaagtatttgaaatgggaggaccatatgtcgatatcttagataaaagctcgatagaagcaaaaaaaga

SEQ ID NO: 888738 - DNA, 75 bp, synthetic construct
  source 1..75: mol_type = other DNA
agggattgttcagctcagtagcgccacgaacagcacgtctgaaacgctggcagcaacaccaaaagctgttaaggc

SEQ ID NO: 888739 - DNA, 75 bp, synthetic construct
  source 1..75: mol_type = other DNA
atgacaatcacaaaacaacggttagaagaaatcatatcccgcattgaaatgtatggacatggtgcagggtatacc

SEQ ID NO: 888740 - DNA, 75 bp, synthetic construct
  source 1..75: mol_type = other DNA
tcactcagtatccgggacagagccattgcctcctggccacctgcctggcacggacaaaatcttcgcgacattctg

SEQ ID NO: 888741 - DNA, 75 bp, synthetic construct
  source 1..75: mol_type = other DNA
ctgcacgtgatgatatggcgcggcagcattcatgtgatggagtggcgcacgaagtctggcggaaacaccgccgat

SEQ ID NO: 888742 - DNA, 75 bp, synthetic construct
  source 1..75: mol_type = other DNA
gtggatgtcacctttgaagatgaaaagggtgctaatcacaccgtgacgctggagaacggcgataacggctggaca

SEQ ID NO: 888743 - DNA, 75 bp, synthetic construct
  source 1..75: mol_type = other DNA
gtggatgtcacctttgaagatgaaaagggtgttaaccacaccgtgacgctggagaacggcgataacggctggaca

SEQ ID NO: 888744 - DNA, 75 bp, synthetic construct
  source 1..75: mol_type = other DNA
ataaagtgacggcagatggccagtattctgtaactgcggaaatcacagacccggcaggtaacacgagtggccagg

SEQ ID NO: 888745 - DNA, 75 bp, synthetic construct
  source 1..75: mol_type = other DNA
gtgcatatgtgtatctttgatacagcgcacattaacatcgggagaataatcgtgtcatccaaggctaattatgaa

SEQ ID NO: 888746 - DNA, 75 bp, synthetic construct
  source 1..75: mol_type = other DNA
tatcagatactcaagcttataggcaatttgggaactcagttgttgtgccagtatttgaagctgtagcaagattac

SEQ ID NO: 888747 - DNA, 75 bp, synthetic construct
  source 1..75: mol_type = other DNA
gtggatgtcacctttgaagatgaaaagggtgctaaccacaccgtgacgctggagaacggtgataacggctggaca

SEQ ID NO: 888748 - DNA, 75 bp, synthetic construct
  source 1..75: mol_type = other DNA
aaacatagacatgaaaatgatgagtctgatactacggccccatcgtcaccagaactgaaggctgagaataacggt

SEQ ID NO: 888749 - DNA, 75 bp, synthetic construct
  source 1..75: mol_type = other DNA
agtgaagttacaggggttgccaaagatccgagcggtaatgaaagtgatccggcaacagcaacgtcaaaaacagat

SEQ ID NO: 888750 - DNA, 75 bp, synthetic construct
  source 1..75: mol_type = other DNA
tgtggttgattttgcagcagatacccagatcccgggagataccgatggtgatggtgcaacagatgcaatgccggt

SEQ ID NO: 888751 - DNA, 75 bp, synthetic construct
  source 1..75: mol_type = other DNA
ttccggcggataaagtgacggcagatggccagtattctgtaactgcggaaatcacagacccggcaggcaacacca

SEQ ID NO: 888752 - DNA, 75 bp, synthetic construct
  source 1..75: mol_type = other DNA
tctgtcaatctggctacagggaagaatgaaggtattgccggcttcgaaaaagtggatatgactgttggtatggac

SEQ ID NO: 888753 - DNA, 75 bp, synthetic construct
  source 1..75: mol_type = other DNA
tgctactgtttctatgggggacggcaatgatactgttaccgtcactgatggtgcatataacacgactatttcact

SEQ ID NO: 888754 - DNA, 75 bp, synthetic construct
  source 1..75: mol_type = other DNA
gacggaaagcactttttgcctcagcaccgcgaacgtattgttctggtcggttttcgtcgcgacctgaatattcac

SEQ ID NO: 888755 - DNA, 75 bp, synthetic construct
  source 1..75: mol_type = other DNA
taacggtggagaaggtagcgatactctggttctggcaggtaatatttctgtcaatctggctacagggaagaatga

SEQ ID NO: 888756 - DNA, 75 bp, synthetic construct
  source 1..75: mol_type = other DNA
gctgcaggtaaagctgatgtgaccattccggcggataaagtgacggcagatggtcagtattctgtaaccgcggaa

SEQ ID NO: 888757 - DNA, 75 bp, synthetic construct
  source 1..75: mol_type = other DNA
aggaatatctttctgtttatcaggatggcagtaatttaagcttgggtaacgacaacaatattgacactgccacag

SEQ ID NO: 888758 - DNA, 75 bp, synthetic construct
  source 1..75: mol_type = other DNA
tgccggaaataacaggcggcaggctgtcgttgctggcactggagcagatggcagaacaggggaaagcatggcccc

SEQ ID NO: 888759 - DNA, 75 bp, synthetic construct
  source 1..75: mol_type = other DNA
tgtggctcgtatcatcatggcaaaaaaaccggccatctttgtactcgagaacgtcaagaacctcaaaagccatga

SEQ ID NO: 888760 - DNA, 75 bp, synthetic construct
  source 1..75: mol_type = other DNA
tattctgtaactgcggaaatcacagacccggcaggtaacacgagtggccaggggcagccggcagacttcgcagtg

SEQ ID NO: 888761 - DNA, 75 bp, synthetic construct
  source 1..75: mol_type = other DNA
gctggatgcagcccataaagcgaaagataaatgggcgcatacctcggtgcaggatcgtgcggcgattctgtttaa

SEQ ID NO: 888762 - DNA, 75 bp, synthetic construct
  source 1..75: mol_type = other DNA
atttccacgaaccgttaggcgtggtggggcagattattccgtggaacttcccgctgctgatggcgagctggaaaa

SEQ ID NO: 888763 - DNA, 75 bp, synthetic construct
  source 1..75: mol_type = other DNA
gtctatctacgaacgctttatggagcgcgctattcgccgagtcgaaagcattcgcagcggtaacccgctcgacag

SEQ ID NO: 888764 - DNA, 75 bp, synthetic construct
  source 1..75: mol_type = other DNA
aacgtactggtgtaacaaatgccggacagatttatcttggttcaggtagtgatacatttatccagggggatgcta

SEQ ID NO: 888765 - DNA, 75 bp, synthetic construct
  source 1..75: mol_type = other DNA
tcctcaactacattgatatcggtaaaaaagagggcgcagacgtgctcaccggcgggcggcgcaagctgctggaag

SEQ ID NO: 888766 - DNA, 75 bp, synthetic construct
  source 1..75: mol_type = other DNA
atgaccaataatcccccttcagcacagattaagcccggcgagtattaccagaacctgacgccggtgaccgggcag

SEQ ID NO: 888767 - DNA, 75 bp, synthetic construct
  source 1..75: mol_type = other DNA
acgtggtgctgctggccgctgacgaacagcctttcgactcggcgaccacctggcttaacgggctggagtgggacg

SEQ ID NO: 888768 - DNA, 75 bp, synthetic construct
  source 1..75: mol_type = other DNA
cgcgataatccagctgattattgtcggctatgtgctgaaatatattttcagcgtggatgatgccagcctgacatt

SEQ ID NO: 888769 - DNA, 75 bp, synthetic construct
  source 1..75: mol_type = other DNA
aatcattggcactggcattaatgctggtggtggtggcaatcttaattagtcataaagaaaaactggcgctggaga

SEQ ID NO: 888770 - DNA, 75 bp, synthetic construct
  source 1..75: mol_type = other DNA
gtcggggcgggaattaccctggcggtgctgattctctcagggtcgattgagtttatcccgatgcaggtgattcct

SEQ ID NO: 888771 - DNA, 75 bp, synthetic construct
  source 1..75: mol_type = other DNA
atgatctcatatcagggacttgttcgcaccttccttaatgcctcctggtcagaagtattaaatcaatatcaacgt

SEQ ID NO: 888772 - DNA, 75 bp, synthetic construct
  source 1..75: mol_type = other DNA
gattacacaccgaagaaaaattatttgccggatgatgtcgccgctgtgagtaaagcaccaacaatagattttagc

SEQ ID NO: 888773 - DNA, 75 bp, synthetic construct
  source 1..75: mol_type = other DNA
atggcattactggaaatttgctgttacagcatggaatgtgcgctaacggcgcagcaaaacggcgcagacagagtt

SEQ ID NO: 888774 - DNA, 75 bp, synthetic construct
  source 1..75: mol_type = other DNA
tgcaaaacgcgcgactaaaggcaccgctggatatttatcttaaagtgaacagcgggatgaatcggctgggcttca

SEQ ID NO: 888775 - DNA, 75 bp, synthetic construct
  source 1..75: mol_type = other DNA
gttggcgaaatgaccctgatgtcgcattttgccgaagcggaacatcctgatggaatttccggcgcgatggcgcgt

SEQ ID NO: 888776 - DNA, 75 bp, synthetic construct
  source 1..75: mol_type = other DNA
gagatcaaaattgatgatgtcgccgccgctgccggaacggtgggctatgagttgatgtgcgcgctggcgctacgc

SEQ ID NO: 888777 - DNA, 75 bp, synthetic construct
  source 1..75: mol_type = other DNA
gtgttgatgatgccagtctgacattattgatggtgttatttatctgctttaatgcggcatggaatgcgcaaaaac

SEQ ID NO: 888778 - DNA, 75 bp, synthetic construct
  source 1..75: mol_type = other DNA
cgcctgtaactgatgacatcagcagagcactggcttttgccattaagtgggtggcggttggtgttgctgtgtccc

SEQ ID NO: 888779 - DNA, 75 bp, synthetic construct
  source 1..75: mol_type = other DNA
tggcggggcaattactgcatgcgcttcatcgaactgatagtcgctgccctcttattattattgaaaatgctcacc

SEQ ID NO: 888780 - DNA, 75 bp, synthetic construct
  source 1..75: mol_type = other DNA
cctttgaagaatatgttcaacatgtacatgatgcgggtaaagaaatggttcaaacttattactttaataaaggat

SEQ ID NO: 888781 - DNA, 75 bp, synthetic construct
  source 1..75: mol_type = other DNA
tagattctattctggatgaacatcaacagatatatcgcagacataaccgaatagataacatcctggcgttttgtg

SEQ ID NO: 888782 - DNA, 75 bp, synthetic construct
  source 1..75: mol_type = other DNA
cttttttattttcttcttcaccctcctgccggaatcactcatggtcctcagccgtcagagcctgcttcagcttat

SEQ ID NO: 888783 - DNA, 75 bp, synthetic construct
  source 1..75: mol_type = other DNA
cgatgccaccaaacgtctggtattcctgaaagatcgtctggcgaaatatgaatactccgtggccgagtactatac

SEQ ID NO: 888784 - DNA, 75 bp, synthetic construct
  source 1..75: mol_type = other DNA
ccattacctcaacggcaaaaacgattgattatgaggtcgaggttgaacgctataacaaatccgcgaaacgcgctt

SEQ ID NO: 888785 - DNA, 75 bp, synthetic construct
  source 1..75: mol_type = other DNA
ggccagtagtccggtagcggtacagcttagtgctccacttcgtaccgatgccgttaataaaaaagcccgtgacga

SEQ ID NO: 888786 - DNA, 75 bp, synthetic construct
  source 1..75: mol_type = other DNA
cttcttcaccctcctgccggaatcactcatggttctcagccgtcagagcctgcttcagcttatgcgtctgactga

SEQ ID NO: 888787 - DNA, 75 bp, synthetic construct
  source 1..75: mol_type = other DNA
tgaccatctggaaaggttctgtttcgctgaaggaagatccggcgggcaactacattcactacggggtgcgtgaat

SEQ ID NO: 888788 - DNA, 75 bp, synthetic construct
  source 1..75: mol_type = other DNA
ataatacactgtacgattgggtaagtttttattcccaatcatttagtgctatggctgaggaactatcaaaggaga

SEQ ID NO: 888789 - DNA, 75 bp, synthetic construct
  source 1..75: mol_type = other DNA
cgcaactggaagcgttagataatcgctatccgtttggtccgtattcgcagcaggtgcagctggatctcatctacg

SEQ ID NO: 888790 - DNA, 75 bp, synthetic construct
  source 1..75: mol_type = other DNA
gggttctttggcgttgaccgtagcgatcgcgatcctcaacatgcacgagctgcgtttagtgacttttccaaactg

SEQ ID NO: 888791 - DNA, 75 bp, synthetic construct
  source 1..75: mol_type = other DNA
tgattggattgatggcttatcctatccggcacagtttatcgcctgaaatgcagaataaagccttagaaaaagcgg

SEQ ID NO: 888792 - DNA, 75 bp, synthetic construct
  source 1..75: mol_type = other DNA
cacagcaactggcagctcaaagcactgcaaaatgcgcggctaaaagcaccgctggatatttatcttaaagtgaac

SEQ ID NO: 888793 - DNA, 75 bp, synthetic construct
  source 1..75: mol_type = other DNA
ttatgacgcttttcatagacggtaaaaacgaaattggtcaggtggtgtctgtcacgttacccaaactgacgcgca

SEQ ID NO: 888794 - DNA, 75 bp, synthetic construct
  source 1..75: mol_type = other DNA
tgttcgtgcgctgttccttaaatatggcggcacgattgacggcacgctgctgcgttttgcgggtgaatactacac

SEQ ID NO: 888795 - DNA, 75 bp, synthetic construct
  source 1..75: mol_type = other DNA
ggaaatcgacctgctgaaccacatctaccggaaggacggcaaggacattgtgcctgaccgtatccgttccgcgct

SEQ ID NO: 888796 - DNA, 75 bp, synthetic construct
  source 1..75: mol_type = other DNA
tttttacgctgtttgtggatggtgaaaacgaagtgggtaaggtgacctccgtcactctgcccaaactgacgcgca

SEQ ID NO: 888797 - DNA, 75 bp, synthetic construct
  source 1..75: mol_type = other DNA
tttttacgctgtttgtggatggtgaaaacgaagtgggtaatgtgacctccgtcactcagcccaaactgacgcgca

SEQ ID NO: 888798 - DNA, 75 bp, synthetic construct
  source 1..75: mol_type = other DNA
tttttacgttgtttgtggatggtgaaaacgaagtgggtaacgtgacctccgtcactcagcccaaactgacgcgca

SEQ ID NO: 888799 - DNA, 75 bp, synthetic construct
  source 1..75: mol_type = other DNA
tatgagtacacgagcaatagaaatactgaagcatatttatggtgagggtgaattttccaccgactacgacttgca

SEQ ID NO: 888800 - DNA, 75 bp, synthetic construct
  source 1..75: mol_type = other DNA
tctctaacaataaaaatatatttggattctgtattaaagaatcaacaggtttccttaaaatgcttactctatgta

SEQ ID NO: 888801 - DNA, 75 bp, synthetic construct
  source 1..75: mol_type = other DNA
aaataatatggtataaaaatgcgcttaggaacttttcacaaaaagaaaagattttatataaacaaaatcaagatc

SEQ ID NO: 888802 - DNA, 75 bp, synthetic construct
  source 1..75: mol_type = other DNA
gccattaaaaacacctactacaagctgagtgttaacgatcgcccgttgtgggagattgacctgctgaacttcatt

SEQ ID NO: 888803 - DNA, 75 bp, synthetic construct
  source 1..75: mol_type = other DNA
taaaggggttaaaataaccattcttacaaatagaaagggtggggagtttctctctaacaataaaaatatatttga

SEQ ID NO: 888804 - DNA, 75 bp, synthetic construct
  source 1..75: mol_type = other DNA
tatcgctgcggcttatcataaaccaacgcttgcattttatcctaattcacgtagtccagaatatccctcacactt

SEQ ID NO: 888805 - DNA, 75 bp, synthetic construct
  source 1..75: mol_type = other DNA
tttttacggtgtttgtggatggtgaaaacgaagtgggtaacgtgacctccgtcactctgcccaaactgacgcgca

SEQ ID NO: 888806 - DNA, 75 bp, synthetic construct
  source 1..75: mol_type = other DNA
tgaaaaaagcccaagataaccttatgaactcgcttccggaaatgtcttggagcgcttcggcgtggggagcgtggg

SEQ ID NO: 888807 - DNA, 75 bp, synthetic construct
  source 1..75: mol_type = other DNA
ggaaataacggcattgaaggcccgaatgttcaaggcctaccaggtcaggttcaaggggctgtaggcagtggacct

SEQ ID NO: 888808 - DNA, 75 bp, synthetic construct
  source 1..75: mol_type = other DNA
tcatgggtgctgctgcaagcggctatagtgcagccaaagaatggttaagtggtaaatcagacctatcagaagccg

SEQ ID NO: 888809 - DNA, 75 bp, synthetic construct
  source 1..75: mol_type = other DNA
gagaatgatgagttgcttcctggaactggatttcccttggtagaggctttgctggggctaaataagtataaaaaa

SEQ ID NO: 888810 - DNA, 75 bp, synthetic construct
  source 1..75: mol_type = other DNA
tcaggacaccgggatacctgtttccacttttcttcatgtaagcaaggcggtaaaccaccgttgttcgtgtgaggt

SEQ ID NO: 888811 - DNA, 75 bp, synthetic construct
  source 1..75: mol_type = other DNA
gtacccaatgtcacggaaagccacttctcagaaacactgaaacttttgaatgacgttagacggcgggcctatgac

SEQ ID NO: 888812 - DNA, 75 bp, synthetic construct
  source 1..75: mol_type = other DNA
gagtatttgttttgtgtcgcgggatgtcaataaactcctggatatgtttgctaaaaacaaccagacaaacatacc

SEQ ID NO: 888813 - DNA, 75 bp, synthetic construct
  source 1..75: mol_type = other DNA
cagcatggatatgaataagtttcgtgacagggttcataacacaattgtgcaggagacacaaaaaatgcccaaata

SEQ ID NO: 888814 - DNA, 75 bp, synthetic construct
  source 1..75: mol_type = other DNA
aaactgacagctatcgtggtggtggcatgatgggtgcggtgagtattgatctcggtcttgatgattctgcgcttg

SEQ ID NO: 888815 - DNA, 75 bp, synthetic construct
  source 1..75: mol_type = other DNA
cacaagataacctcattaactcgcttccggagatgtcttggagcgcttcggcatggggggcgtgggataacttca

SEQ ID NO: 888816 - DNA, 75 bp, synthetic construct
  source 1..75: mol_type = other DNA
actgaatgactatttccgaaatgccgctccgcagtcggttaaagacgaggctgcttcactacagcaaagatacca

SEQ ID NO: 888817 - DNA, 75 bp, synthetic construct
  source 1..75: mol_type = other DNA
actattgcaccgttcgtgacagtgagctccgcacaggcattacaaagtcagaaatcggaggctttccaaagcact

SEQ ID NO: 888818 - DNA, 75 bp, synthetic construct
  source 1..75: mol_type = other DNA
ctatggtgtccgttctgatgagcggctctgctctggctgcaccgggggctaacgattccagtcaggccacgctga

SEQ ID NO: 888819 - DNA, 75 bp, synthetic construct
  source 1..75: mol_type = other DNA
taatattacctataccatccgcgatggtaatggtctgcctgggcaagatgcacatgcatcggattatctgattcc

SEQ ID NO: 888820 - DNA, 75 bp, synthetic construct
  source 1..75: mol_type = other DNA
gtcaggaagttacgttagatatcatcaaagatactgatggaacaagtgcattacctcagcaggtaattcctctgc

SEQ ID NO: 888821 - DNA, 75 bp, synthetic construct
  source 1..75: mol_type = other DNA
ttggtgctcagggtggggcaggtggcgttgctgctgttaccgcaggtacggttgatgcaactggtattttgacca

SEQ ID NO: 888822 - DNA, 75 bp, synthetic construct
  source 1..75: mol_type = other DNA
tgtattgagtgatgcaaatggtaatggtaccgccgcttatctgattccaaaatcaggtgatacttctgcaaccgg

SEQ ID NO: 888823 - DNA, 75 bp, synthetic construct
  source 1..75: mol_type = other DNA
gtggtaaaagatatttatttgggtgaggtatccaaatccgcactggaagctaatgctcaggggcctaaacagagc

SEQ ID NO: 888824 - DNA, 75 bp, synthetic construct
  source 1..75: mol_type = other DNA
acaaaacgtcggtctggtcagcgtgacgcgcgttcatagccgctgggtgtgtatttcttcggggattattttaat

SEQ ID NO: 888825 - DNA, 75 bp, synthetic construct
  source 1..75: mol_type = other DNA
ccatgaccgcagtactcatcatcgtatttattgagtcgatggggatgttcctggcactgggtgaaatagtcggtc

SEQ ID NO: 888826 - DNA, 75 bp, synthetic construct
  source 1..75: mol_type = other DNA
ggcgtgggcatgaccccaacgctttctcacgatttcttttctaagttaccagccgtactacaaccattgctgcat

SEQ ID NO: 888827 - DNA, 75 bp, synthetic construct
  source 1..75: mol_type = other DNA
ccgtattttcaattcttaccagtggtactgcactggcagcaccatcggcgaacgactcaagcactgctcaactaa

SEQ ID NO: 888828 - DNA, 75 bp, synthetic construct
  source 1..75: mol_type = other DNA
gtgagccagttaaattagatatcattaaggatactaatggaacgaatgcgcttccacaacaaactatcccgctgc

SEQ ID NO: 888829 - DNA, 75 bp, synthetic construct
  source 1..75: mol_type = other DNA
ggccgtactgcaaccgctgctgcatagcggcattatgctcgcaacccttagcgccgttgtgctgaacgtcttctt

SEQ ID NO: 888830 - DNA, 75 bp, synthetic construct
  source 1..75: mol_type = other DNA
cggtggtttctgctctgttcagcgccggcgctatggctgctgatagtgttaatgcgaatggccaggctgataact

SEQ ID NO: 888831 - DNA, 75 bp, synthetic construct
  source 1..75: mol_type = other DNA
atgatgtcgaagtcgatgcctggcaaggcggcgtatctctctatactggcccggtgatcaccagctaccgctata

SEQ ID NO: 888832 - DNA, 75 bp, synthetic construct
  source 1..75: mol_type = other DNA
cgtaatttagcgtatgctgaactggtagcaaaagttgaaaacgcaacgctgctttttaatctttcccaggggcgt

SEQ ID NO: 888833 - DNA, 75 bp, synthetic construct
  source 1..75: mol_type = other DNA
ccagctaccgctatacccattatgactccagcgatgcaggtggtagttacagcaatatgatttccgtgcgtctga

SEQ ID NO: 888834 - DNA, 75 bp, synthetic construct
  source 1..75: mol_type = other DNA
caattctggaattctgataaggtaggaactcgtgtgattttgtacagtgatccatcacgtaaggagtataaatat

SEQ ID NO: 888835 - DNA, 75 bp, synthetic construct
  source 1..75: mol_type = other DNA
catttttcactacctaacatttccttggaagaaaattacatgatccataggtcaatgtatgctgtttatgaaaca

SEQ ID NO: 888836 - DNA, 75 bp, synthetic construct
  source 1..75: mol_type = other DNA
aaattatatcggtgatctttcattttcactatcaatgggatgaaagcgatctcaaacagcgcaatatcattgctg

SEQ ID NO: 888837 - DNA, 75 bp, synthetic construct
  source 1..75: mol_type = other DNA
cagaccgtggccaaaaccagtgataccaacgcccgtccgatcgccggaaaggtgctgggtcttgagaatgatggc

SEQ ID NO: 888838 - DNA, 75 bp, synthetic construct
  source 1..75: mol_type = other DNA
aataaatataatgaagagcgagaaagtcaaaagataatacctgagccatcaggagaggctgtgaaaaaaatgatt

SEQ ID NO: 888839 - DNA, 75 bp, synthetic construct
  source 1..75: mol_type = other DNA
accgaaatgcatatcactttacgtcagtagataatcttgaatcaataattgaaactgggctgttttcgactaatc

SEQ ID NO: 888840 - DNA, 75 bp, synthetic construct
  source 1..75: mol_type = other DNA
agcttatgctgaactggtggcaaaagttgaaaacgcaacgctgctttttaatctttcccaggggcgtcgtgatta

SEQ ID NO: 888841 - DNA, 75 bp, synthetic construct
  source 1..75: mol_type = other DNA
gatattctactgttgactatttgtgccgttatttctggtgcagaaggttgggaagatatagaggatttcggggaa

SEQ ID NO: 888842 - DNA, 75 bp, synthetic construct
  source 1..75: mol_type = other DNA
acaagcctggaaagtggaacataaattatctgatattctactgttgactatttgtgccgttatttctggtgcaga

SEQ ID NO: 888843 - DNA, 75 bp, synthetic construct
  source 1..75: mol_type = other DNA
tcagtggccatatgaataccttcgaaatcgaagcgctgatggatgaagaaattgaaacccacgaaagcgagtcgg

SEQ ID NO: 888844 - DNA, 75 bp, synthetic construct
  source 1..75: mol_type = other DNA
ggtgctgtggctgattaaagctgatgaccgtgcgctggcggtggatgagtatttttaccgaaaggtgattagtga

SEQ ID NO: 888845 - DNA, 75 bp, synthetic construct
  source 1..75: mol_type = other DNA
ggccaccagcccggtggtgtcgcaactccagtcttcctttcgcacgacggtagtccgggaacaggctcgtagcga

SEQ ID NO: 888846 - DNA, 75 bp, synthetic construct
  source 1..75: mol_type = other DNA
gggtaagagcggtgccggtaaatcctcactctgcaatgccctgtttgccagtgaggtatcaccggtcagcgatgt

SEQ ID NO: 888847 - DNA, 75 bp, synthetic construct
  source 1..75: mol_type = other DNA
gttagcgctggggccgaattgattgccgatggtaacattcatgtctatggcatgatgcgcggtcgtgcgctggca

SEQ ID NO: 888848 - DNA, 75 bp, synthetic construct
  source 1..75: mol_type = other DNA
gaagtggatagcttacctgaagatgtagatatcaacggcagttgggtgtttagagataactccgttgtaaaacgc

SEQ ID NO: 888849 - DNA, 75 bp, synthetic construct
  source 1..75: mol_type = other DNA
tagatatcaacggtggttgggtgtttagagacaactctgttgttaaacgcatatattctgatacggagttacaac

SEQ ID NO: 888850 - DNA, 75 bp, synthetic construct
  source 1..75: mol_type = other DNA
aagctaaccattttgatgccgcgccgcgccttgaattgttggatggcgatgcgacgccgattccggtaaagctgg

SEQ ID NO: 888851 - DNA, 75 bp, synthetic construct
  source 1..75: mol_type = other DNA
caccacagtcccaggtgctcactgaacaacggctgaagtattggtttaaactggcagatccgcaaacgcgcaata

SEQ ID NO: 888852 - DNA, 75 bp, synthetic construct
  source 1..75: mol_type = other DNA
gagctggataatggaccacatcaattggtctttcgcgttgaaaaaaccattaacctttctgctaatgaagaaaga

SEQ ID NO: 888853 - DNA, 75 bp, synthetic construct
  source 1..75: mol_type = other DNA
cggcgtgggcgaaagcggcgctcgcgatagcgagtatgctgcgctgtaccgtgaacaacttccccgacttgacct

SEQ ID NO: 888854 - DNA, 75 bp, synthetic construct
  source 1..75: mol_type = other DNA
gcctgaccgcgccaccagcccggtggtgacacaactgcacaggaaactctgcacagagccagtaaagtcgcaggc

SEQ ID NO: 888855 - DNA, 75 bp, synthetic construct
  source 1..75: mol_type = other DNA
tgataccgcccccaatacgggcaatcattcaggttgcacgcgacaccgtggtatctgtcgcccgtgccgtctgga

SEQ ID NO: 888856 - DNA, 75 bp, synthetic construct
  source 1..75: mol_type = other DNA
acggcccaatcgggacggtacgcctgacctttaacggtcaatggtcgcgcttcgacaactatgcggggccgcagt

SEQ ID NO: 888857 - DNA, 75 bp, synthetic construct
  source 1..75: mol_type = other DNA
gaaatacatagtgattttgtttttaatcatagtttcacgtcagcgctaacaataaaagatgacaaagtggtggtg

SEQ ID NO: 888858 - DNA, 75 bp, synthetic construct
  source 1..75: mol_type = other DNA
ctatagcatcacgattgatagatcttgaacatgatgttgagaagttgaaatgcatgtatggcaacaataaagacg

SEQ ID NO: 888859 - DNA, 75 bp, synthetic construct
  source 1..75: mol_type = other DNA
ggttcgatgatttttttgatttgttatttttccacctttggcatgttagttcttgcccccactgattccccccgt

SEQ ID NO: 888860 - DNA, 75 bp, synthetic construct
  source 1..75: mol_type = other DNA
ggtattgtcgcggctgtaatgggggtcgttcacgcgttaggttcagccgatcgtcctgccgccgagctgggggcg

SEQ ID NO: 888861 - DNA, 75 bp, synthetic construct
  source 1..75: mol_type = other DNA
tggtgattattgccggtgcagggattgggtcgtttatcgtcggcaataatggaaaagcgattaaaggcacgctga

SEQ ID NO: 888862 - DNA, 75 bp, synthetic construct
  source 1..75: mol_type = other DNA
cggatttatttccccattagcgagtgttttacgtcagaaaagcgccgaaaccagcaaaatgatgcagtgcgtcaa

SEQ ID NO: 888863 - DNA, 75 bp, synthetic construct
  source 1..75: mol_type = other DNA
ccatctctggcgttcctgcagtctcgtgctcaggatataattgtcggtggtaaaaactatggcaatcaggatctg

SEQ ID NO: 888864 - DNA, 75 bp, synthetic construct
  source 1..75: mol_type = other DNA
gacggcaggcaataaaacccgtctggcatttgccggtttgaaattcgctgatttaggtagcattgattacgggcg

SEQ ID NO: 888865 - DNA, 75 bp, synthetic construct
  source 1..75: mol_type = other DNA
tattccgaaactcagaatctgacgacctttggtgataaaggagttgcagataaagcgcaaaactttgaagcggta

SEQ ID NO: 888866 - DNA, 75 bp, synthetic construct
  source 1..75: mol_type = other DNA
gcaggttaatggaggaagctctgttgccagtggtaaatatgctgaaatgtggggggctggtctgaaatatgatgc

SEQ ID NO: 888867 - DNA, 75 bp, synthetic construct
  source 1..75: mol_type = other DNA
ttccgcgggaaataaaacccgtctggcatttgcaggtctgagatttgctgatgttggtagcattgattacggacg

SEQ ID NO: 888868 - DNA, 75 bp, synthetic construct
  source 1..75: mol_type = other DNA
acgataagcccgtattggtttttagccttgagatgccgagccaccagctgatgatgcgctcactggcttctcttg

SEQ ID NO: 888869 - DNA, 75 bp, synthetic construct
  source 1..75: mol_type = other DNA
aagcagcgcagcgtgcccgccaggctgaatctggtaaccgcaagctggaattgcaactagacgagcaggaactgg

SEQ ID NO: 888870 - DNA, 75 bp, synthetic construct
  source 1..75: mol_type = other DNA
gagatgagcgagtacatcgcgttgcttatccgccaggatgatgcgcgagttcgtggccgtatcaagtcaatcagt

SEQ ID NO: 888871 - DNA, 75 bp, synthetic construct
  source 1..75: mol_type = other DNA
tgcatctggtgtgtgtaagctggaaattgtgcttgatgctcaggaaattgaaatgctggcgcggaactgcgccgc

SEQ ID NO: 888872 - DNA, 75 bp, synthetic construct
  source 1..75: mol_type = other DNA
ggtgtctggaaatataggggcaaatccagtgtgaactttcgtggccttaaaataaattcaacagaagcgatgttg

SEQ ID NO: 888873 - DNA, 75 bp, synthetic construct
  source 1..75: mol_type = other DNA
ggatgacgaatttattcaaacgcataccgtcggctttgacgagctacgccgtgacgtgctcaattccgagtggaa

SEQ ID NO: 888874 - DNA, 75 bp, synthetic construct
  source 1..75: mol_type = other DNA
gtgccggacaacagcgcatgcacaccacttcaggatcgtttggtcgacgcatcaactgagtttgatgttggtcag

SEQ ID NO: 888875 - DNA, 75 bp, synthetic construct
  source 1..75: mol_type = other DNA
aggctttgtgaagaaatcgaacagctaataaagggaaatgataataaataccatgaggatattatcgatagctac

SEQ ID NO: 888876 - DNA, 75 bp, synthetic construct
  source 1..75: mol_type = other DNA
attcgacaccgtatcatcattgatgaaggttatgtggcagggcttatcaccgaacttatctcactgtttgagcta

SEQ ID NO: 888877 - DNA, 75 bp, synthetic construct
  source 1..75: mol_type = other DNA
atatttatccccctatgcaccgtaaggcgatggttatcacgctgtataacttcttcgaacatcaaatcaaaacgt

SEQ ID NO: 888878 - DNA, 75 bp, synthetic construct
  source 1..75: mol_type = other DNA
gttggcgaaatgaccctgatgtcgcattttgccgaggcggaacatcctgatggaatttccagcgcgatggcgcgt

SEQ ID NO: 888879 - DNA, 75 bp, synthetic construct
  source 1..75: mol_type = other DNA
atgctcaggatctggatatttatgaccagcaccgcctgaccacctgcgtacacagcaactggcagctcaaagcac

SEQ ID NO: 888880 - DNA, 75 bp, synthetic construct
  source 1..75: mol_type = other DNA
gtgaacagtgtgaacagttctttcgaaaaaaaattttttatgtggataaaagatgcactggtttggatccgagct

SEQ ID NO: 888881 - DNA, 75 bp, synthetic construct
  source 1..75: mol_type = other DNA
ctccgaccggagacaccaatgaacagatacaatttattgattattttaatctgtactatagtaagcgtggtcagg

SEQ ID NO: 888882 - DNA, 75 bp, synthetic construct
  source 1..75: mol_type = other DNA
tggtgtgggcggatggtgctgtttccgttccagatcccagcggggttgctatcgacgtttattggcgcgccgtac

SEQ ID NO: 888883 - DNA, 75 bp, synthetic construct
  source 1..75: mol_type = other DNA
gatggcaccacatattgcgcggatgatgggctttcgacggacgatgccgcacattgtgatttcggcgctggtggg

SEQ ID NO: 888884 - DNA, 75 bp, synthetic construct
  source 1..75: mol_type = other DNA
atgaacttctcgcaggcgctgccgcgtagccagtgggcgcaggccgcctggtcgccggatattgacgtcatcgag

SEQ ID NO: 888885 - DNA, 75 bp, synthetic construct
  source 1..75: mol_type = other DNA
gtaacagcaacaacattgcctggttaccctgcccggtagaaaaagggctggccgtttcatggttgctggagaaac

SEQ ID NO: 888886 - DNA, 75 bp, synthetic construct
  source 1..75: mol_type = other DNA
ccaacatgtgctggcgtttgccctcgcgggcggcgtgctgctgttgatggctgtggtggtggcgctgtcgtttgg

SEQ ID NO: 888887 - DNA, 75 bp, synthetic construct
  source 1..75: mol_type = other DNA
ttacgcagcattagcgcgccggatatgaaggttaacgatcgtgtcgcgactgaacgccaacatgtgctggcgttt

SEQ ID NO: 888888 - DNA, 75 bp, synthetic construct
  source 1..75: mol_type = other DNA
atgtgccgccagttaagtcgtgtccatgcgccggtgattcgcaatgctgggttacgcgtggctggcatgatgtga

SEQ ID NO: 888889 - DNA, 75 bp, synthetic construct
  source 1..75: mol_type = other DNA
cactctccgttccgcaaatatatgtcggcagaatggctcgcggctatgtttctcctgatctgtgggaagaaggaa

SEQ ID NO: 888890 - DNA, 75 bp, synthetic construct
  source 1..75: mol_type = other DNA
atgacagcctttcgtgccgcatttaaggcatatcgtatgcatcaggtgttaatactgcctcgctttgcacggctt

SEQ ID NO: 888891 - DNA, 75 bp, synthetic construct
  source 1..75: mol_type = other DNA
gggcgatccctggtgcgatggcgagccagtttgctgcgcttgcgggcgcttgcgttgttggcttaatcgtttttg

SEQ ID NO: 888892 - DNA, 75 bp, synthetic construct
  source 1..75: mol_type = other DNA
gggcactcattctctggctttccgatcagataattctctggctaacccgcgtatggatggaagtttccaccggat

SEQ ID NO: 888893 - DNA, 75 bp, synthetic construct
  source 1..75: mol_type = other DNA
tgtgtggttggcttaatcgtctttggcgtcgcgtggggtaaacgcctttcgccagtgacgttgatcctcgcgggt

SEQ ID NO: 888894 - DNA, 75 bp, synthetic construct
  source 1..75: mol_type = other DNA
gcgcgtttgacagctatctgctgctacgcgggttgcgaacactggtgctgcgtatggagctggcgcagcgcaacg

SEQ ID NO: 888895 - DNA, 75 bp, synthetic construct
  source 1..75: mol_type = other DNA
cgacggattgccagccagacactgttaggtccggatggcaaactgatcattgatcatgacggacaagaatatctg

SEQ ID NO: 888896 - DNA, 75 bp, synthetic construct
  source 1..75: mol_type = other DNA
tgggctggttgctgcacgggcaggagtcaattctggtgccagatttcaacaccaaatgtcagtgccagattttag

SEQ ID NO: 888897 - DNA, 75 bp, synthetic construct
  source 1..75: mol_type = other DNA
atggtggaggacaccgcgcatacgattaataaaaaagtgggctggttgctgcacgggcaggagtcaattctggtg

SEQ ID NO: 888898 - DNA, 75 bp, synthetic construct
  source 1..75: mol_type = other DNA
tggcactcgggaattgggcattccgacagttactgataggctcattcagcaagcgttgctacaagtcctgcaacc

SEQ ID NO: 888899 - DNA, 75 bp, synthetic construct
  source 1..75: mol_type = other DNA
ggccagggcataacccagattgccgaacagatgcggatataccttcgaggctggaagtcctacttccggctggca

SEQ ID NO: 888900 - DNA, 75 bp, synthetic construct
  source 1..75: mol_type = other DNA
tcgggcgtaagtttctcggctattgccttcggcgctggtcaggaaacaccgtcaagattgctgttgctccgaagg

SEQ ID NO: 888901 - DNA, 75 bp, synthetic construct
  source 1..75: mol_type = other DNA
ctcgcttcctttatgcgcttggcattcgcgaagtcggcgaggccactgcagcaggtttggcagcatatttcggca

SEQ ID NO: 888902 - DNA, 75 bp, synthetic construct
  source 1..75: mol_type = other DNA
ttaacgaagatgcgcgacgcacgggcgggaaagtttttgctaacccacgtaatgcggcagctggttcactgcgtc

SEQ ID NO: 888903 - DNA, 75 bp, synthetic construct
  source 1..75: mol_type = other DNA
atgcgtgcttttggtgaaagcctggtggcttatcgcccgcctatcgacacccgtagcgtcagtgagatgcgccag

SEQ ID NO: 888904 - DNA, 75 bp, synthetic construct
  source 1..75: mol_type = other DNA
ttgagttaacggagtccgggcgttattttttccgcaaagctaccgacctgctgaatgattttcacgccatcaaac

SEQ ID NO: 888905 - DNA, 75 bp, synthetic construct
  source 1..75: mol_type = other DNA
tcgacggcgtggtaattaaggtcaactccctggcgcagcaggaacagcttggctttgttgcgcgcgcccctcgtt

SEQ ID NO: 888906 - DNA, 75 bp, synthetic construct
  source 1..75: mol_type = other DNA
agagatcgacagtccgtttgccggtaaaaccgtggtgctcaccggtagcttaagtcagatgtcgcgtgatgatgc

SEQ ID NO: 888907 - DNA, 75 bp, synthetic construct
  source 1..75: mol_type = other DNA
accgcctgtctgtcaggctatcggtcattatctcccgcttactggctggcgaatctctggagcttaaagcgttag

SEQ ID NO: 888908 - DNA, 75 bp, synthetic construct
  source 1..75: mol_type = other DNA
tggttgttggtcagatcctggaaaccggtcgttatggccgcgcagttatcacccgcgttcatgatcgcagcaata

SEQ ID NO: 888909 - DNA, 75 bp, synthetic construct
  source 1..75: mol_type = other DNA
tctttgaagaagatttgcagatccgcttccgtccttcctacttcccgttcaccgaaccttctgcggaagtggacg

SEQ ID NO: 888910 - DNA, 75 bp, synthetic construct
  source 1..75: mol_type = other DNA
tcagcaggcgctgaatgcgcgtaaagcggaactggaaagcgcagcgctgaatgcgcgtctggcggcggaaacgat

SEQ ID NO: 888911 - DNA, 75 bp, synthetic construct
  source 1..75: mol_type = other DNA
aacccagccgttggtgaagaaactgtatcacccgtcgctgccggaaaatcaggggcatgaaattgccgcgcgcca

SEQ ID NO: 888912 - DNA, 75 bp, synthetic construct
  source 1..75: mol_type = other DNA
atcattggcgaagcgacgctcgattttatctcccagttccgccttgatttcggcattctggggatcagcggcatc

SEQ ID NO: 888913 - DNA, 75 bp, synthetic construct
  source 1..75: mol_type = other DNA
tggcgttaagtatgtgacaacccgccgtgattacagcgacgaattagttgaaaagggcattattcaggccagaat

SEQ ID NO: 888914 - DNA, 75 bp, synthetic construct
  source 1..75: mol_type = other DNA
cgtcaccatggcggcgcggcactgccttccagttcagttaacacgccgtggcacgatcgtaaggccacccagacc

SEQ ID NO: 888915 - DNA, 75 bp, synthetic construct
  source 1..75: mol_type = other DNA
ccctgaagaccagacaagagctgattgaaacggccatcgtccagtttgcgcagcatggcgtaagcaagacgacgt

SEQ ID NO: 888916 - DNA, 75 bp, synthetic construct
  source 1..75: mol_type = other DNA
cgtgcgtcatctgattgatgacaagcgtccggtgccggaattgccggaaaaatatcgcccgaagaaaccacgtga

SEQ ID NO: 888917 - DNA, 75 bp, synthetic construct
  source 1..75: mol_type = other DNA
ccttctcaggtgcgtgattacaaagcagaagtcgcgaaacttatcgacgtttccacttgtatcggctgtaaagcc

SEQ ID NO: 888918 - DNA, 75 bp, synthetic construct
  source 1..75: mol_type = other DNA
cgccatcatggcggcgcggcgctgccttccagttcggttaacacgccgtggcacgatcgcaaagctacccagacc

SEQ ID NO: 888919 - DNA, 75 bp, synthetic construct
  source 1..75: mol_type = other DNA
gcgatggcgggatcattggcgaagcaacgctcgattttatctcccagttccgcctcgatttcggcattctgggga

SEQ ID NO: 888920 - DNA, 75 bp, synthetic construct
  source 1..75: mol_type = other DNA
cgcgcgcgcgtcagattgataagatcaaactggaagaagtgaaagtctccagccgtcagaacccgttcatccgct

SEQ ID NO: 888921 - DNA, 75 bp, synthetic construct
  source 1..75: mol_type = other DNA
cgcatctatgctttgccggaaatgagtgaggaagacggctataaagtggccgatctggaagttaaatacggcgaa

SEQ ID NO: 888922 - DNA, 75 bp, synthetic construct
  source 1..75: mol_type = other DNA
gtagttcccgaggcatcgggtcactgtacagtgaatgtggagatatggggcaccagcaactcctgcgctttcatc

SEQ ID NO: 888923 - DNA, 75 bp, synthetic construct
  source 1..75: mol_type = other DNA
ccacggccttcatcaagccgcgctggaagccgctggtgatcacccggaaggcctcgaccggaaattctacgaaat

SEQ ID NO: 888924 - DNA, 75 bp, synthetic construct
  source 1..75: mol_type = other DNA
attctcctgctcgacgaaccgaccaacaacctcgacatcgataccattcgctggctggaacaggtgctgaacgag

SEQ ID NO: 888925 - DNA, 75 bp, synthetic construct
  source 1..75: mol_type = other DNA
agcaggaaggcgatgatgagcaggcagtgcgtagcattctcggtcgtttactgttcagccaggacgatatcaaaa

SEQ ID NO: 888926 - DNA, 75 bp, synthetic construct
  source 1..75: mol_type = other DNA
atcaggtacaaacgtgccctatatgaaaattagcgcaattgattacactcaaaatatcaacggtgattacaaagc

SEQ ID NO: 888927 - DNA, 75 bp, synthetic construct
  source 1..75: mol_type = other DNA
tggaaagggagttgtctgtgtaggcgatccgctttcttgtggttctgttatcgccaacggcgaggatatttttca

SEQ ID NO: 888928 - DNA, 75 bp, synthetic construct
  source 1..75: mol_type = other DNA
tgtggtggttagtgctgccgaagaggaaatgcacgcgccactggagctaggttttcatattgtagcgtacataga

SEQ ID NO: 888929 - DNA, 75 bp, synthetic construct
  source 1..75: mol_type = other DNA
agcagagctttgaaaataactatcttcgccagacaacagcgcaaagtatctctgaaactgtacaacttagcgctt

SEQ ID NO: 888930 - DNA, 75 bp, synthetic construct
  source 1..75: mol_type = other DNA
gttattaccagcatcggtagagaaattcccgctggttggtttgaatagcgccatgttactggtagctgaagatgg

SEQ ID NO: 888931 - DNA, 75 bp, synthetic construct
  source 1..75: mol_type = other DNA
attaatcagctactttatacccctaaacacaccgcacgcttattacaggtgctgaaaaagcagtttcctacctgc

SEQ ID NO: 888932 - DNA, 75 bp, synthetic construct
  source 1..75: mol_type = other DNA
gtttcggacggcggctactgtacgaagaaagaaactaccgacttccgcggagatcacatggtagaatgctatgtg

SEQ ID NO: 888933 - DNA, 75 bp, synthetic construct
  source 1..75: mol_type = other DNA
tcgtaaaaacaccgaacgctcgccgtcggaatatcgtcggcagtaccacagccaactgacagaaaaaccgactac

SEQ ID NO: 888934 - DNA, 75 bp, synthetic construct
  source 1..75: mol_type = other DNA
aggctatgacctgaaggtaaaagaagtggcgcacgcctgcggctttgtcgacagcaactacttctgccgtctgtt

SEQ ID NO: 888935 - DNA, 75 bp, synthetic construct
  source 1..75: mol_type = other DNA
acaccgaacgctcgccgtcggaatatcgtcggcaataccatagccaactgacagaaaaatcgactactccagaat

SEQ ID NO: 888936 - DNA, 75 bp, synthetic construct
  source 1..75: mol_type = other DNA
atgccttattattcatgataataataaacttggtgatctaattgtattaagttcgatttatcgtgaactttatag

SEQ ID NO: 888937 - DNA, 75 bp, synthetic construct
  source 1..75: mol_type = other DNA
cacttcgagaacaagactcaactgtttaatgagatgtggttgcaacagccttcattgcgggagttaatccaggat

SEQ ID NO: 888938 - DNA, 75 bp, synthetic construct
  source 1..75: mol_type = other DNA
ctctgaagacccggcaagaactgattgaaactgccatcgcccagtttgcgcagcatggcgtaagcaagacgacac

SEQ ID NO: 888939 - DNA, 75 bp, synthetic construct
  source 1..75: mol_type = other DNA
gtaacgtcaggggaatattctggactacttgaatcctatttaattcgtagcgaatcccgtatgatgcgccaacta

SEQ ID NO: 888940 - DNA, 75 bp, synthetic construct
  source 1..75: mol_type = other DNA
agtgcttcaccggtaccggccctgtcgctctatgccggtaatcactggtcaacggcaaaagagatattacggaca

SEQ ID NO: 888941 - DNA, 75 bp, synthetic construct
  source 1..75: mol_type = other DNA
tggtttggccgggcagcgaaacacgcgtatgaattatgttgtgatgccttagacgctgagggggctgccagtgaa

SEQ ID NO: 888942 - DNA, 75 bp, synthetic construct
  source 1..75: mol_type = other DNA
tgcagccgcaggagcaacaaacagccaggcttattgtcaccagtttgcttagccactgccgcgatttgctcggca

SEQ ID NO: 888943 - DNA, 75 bp, synthetic construct
  source 1..75: mol_type = other DNA
gcaggcattctatatttcgcccaattacctctcccacctgtttcaaaaaacgggtgcgacgggctttaacgaata

SEQ ID NO: 888944 - DNA, 75 bp, synthetic construct
  source 1..75: mol_type = other DNA
tcaaaatctggcgaagcaacacgtcgcccgacgcggcccgcgcattggttcttttctgctacaaacgctcaatga

SEQ ID NO: 888945 - DNA, 75 bp, synthetic construct
  source 1..75: mol_type = other DNA
gaaccaggtggtttgtcgggcagcagataaagatcttgctcatctgcctgtaataacagtatttgaaaaaataaa

SEQ ID NO: 888946 - DNA, 75 bp, synthetic construct
  source 1..75: mol_type = other DNA
tgtggcgtttgatggctctgccgatattactttgactgcggctaaccttaatgcctatacgaaaacagaggtaac

SEQ ID NO: 888947 - DNA, 75 bp, synthetic construct
  source 1..75: mol_type = other DNA
gtgccgggcaggcctcagccagtgccaccgccgccggaaaatcggcagaaagtgccgcatcgtctgcttcaacgg

SEQ ID NO: 888948 - DNA, 75 bp, synthetic construct
  source 1..75: mol_type = other DNA
ggagcaataacaacagcacagttagtgacgttattgcaaaataatggagcatttaacacaaagtgcgtgggccta

SEQ ID NO: 888949 - DNA, 75 bp, synthetic construct
  source 1..75: mol_type = other DNA
agcaataacatatcttattgcaggtggtttgtgctggtatatgttgtgggcatccgccatatctcattatactgt

SEQ ID NO: 888950 - DNA, 75 bp, synthetic construct
  source 1..75: mol_type = other DNA
atgaatctgaatatgatgttgtttttccgggaccatcaagaggaaagtatggacattgtgaagcgggactctggt

SEQ ID NO: 888951 - DNA, 75 bp, synthetic construct
  source 1..75: mol_type = other DNA
ttcaaaagatgaggcgaccaagcaggcatcagaagcgaagggcagtgcttcaacggcatccacgaaagcaacaga

SEQ ID NO: 888952 - DNA, 75 bp, synthetic construct
  source 1..75: mol_type = other DNA
ttctaagttcctatgtgaagagcagtgctcttccaagcatgactgtgcgaacttcctctatttcaggtggggata

SEQ ID NO: 888953 - DNA, 75 bp, synthetic construct
  source 1..75: mol_type = other DNA
aacggtttgcgacctattacaattaataataccagcggtgcggtatcaattggtaatggactaaatgtgactggt

SEQ ID NO: 888954 - DNA, 75 bp, synthetic construct
  source 1..75: mol_type = other DNA
aagctttatgacggaagaacagtccatgttagtggactggctcctagagcaagctgaactcattcccgttaccgc

SEQ ID NO: 888955 - DNA, 75 bp, synthetic construct
  source 1..75: mol_type = other DNA
ggattaccggtgctttgtggaagcgtacagccgtcggattaacgaatttcgcctggatcaacacatccggcgata

SEQ ID NO: 888956 - DNA, 75 bp, synthetic construct
  source 1..75: mol_type = other DNA
gccttaccaccaaaggtgttgtgaaacttagcagtgctgtcgacagcaccagtgaatcgctggccgcaacgccaa

SEQ ID NO: 888957 - DNA, 75 bp, synthetic construct
  source 1..75: mol_type = other DNA
gcgtcagcaagcgcagcctcagcaagtgcggatagtgcttcatcaagtgcaactgcggcaggaaaatctgcggaa

SEQ ID NO: 888958 - DNA, 75 bp, synthetic construct
  source 1..75: mol_type = other DNA
gttgtttatacgatgtatagcacacatcagaaaccgacgccgttagatattggagcactgccaacaaccggagga

SEQ ID NO: 888959 - DNA, 75 bp, synthetic construct
  source 1..75: mol_type = other DNA
tacgttaggttcatggaacagtttgcgaccgattataattaataatagcagcggtgttgtgtctattggtaatgg

SEQ ID NO: 888960 - DNA, 75 bp, synthetic construct
  source 1..75: mol_type = other DNA
acagaggtaacaaaccttctaagttcctatgcaagcagatcatcactgacaggctatagtggcaacctggatatt

SEQ ID NO: 888961 - DNA, 75 bp, synthetic construct
  source 1..75: mol_type = other DNA
agtattccgctttcagaatggagttgctattgcttttaaaaacattcaggctggtgatagtaaaaagttctcgct

SEQ ID NO: 888962 - DNA, 75 bp, synthetic construct
  source 1..75: mol_type = other DNA
ttgcaaaacagcagcacgctgtcgaacgcacccgtgaactgttcgccaaaagtctgggctatagcaaaccgcaaa

SEQ ID NO: 888963 - DNA, 75 bp, synthetic construct
  source 1..75: mol_type = other DNA
aacggcggcactggatagacccaatatcacggtttatggacctaccgatccgggattaattggcgggtatgggaa

SEQ ID NO: 888964 - DNA, 75 bp, synthetic construct
  source 1..75: mol_type = other DNA
gcgcgtttgacagctatctgctgctacgcgggttgcgaacgctggtgccgcgcatggagttggcccagcgtaacg

SEQ ID NO: 888965 - DNA, 75 bp, synthetic construct
  source 1..75: mol_type = other DNA
aacagccacaacgaaggctggcgaagccactgaacaggccagcgcagcagcgaggtctgcttccgcagcgaagac

SEQ ID NO: 888966 - DNA, 75 bp, synthetic construct
  source 1..75: mol_type = other DNA
gacaacagctaccacaaaagcgacagaggcgacgagtcaggctacagctgctaaaaattcagcatcggcagcaaa

SEQ ID NO: 888967 - DNA, 75 bp, synthetic construct
  source 1..75: mol_type = other DNA
cggcgtcatcggcatcatctgcgtctgcttcaaaagatgaggcgaccagacaggcgtcagcagcgaagggcagtg

SEQ ID NO: 888968 - DNA, 75 bp, synthetic construct
  source 1..75: mol_type = other DNA
agaatactactggtaatgccgcaacagccacaaaattgcagacagcaaggaaaattgctggtgtggcgtttgatg

SEQ ID NO: 888969 - DNA, 75 bp, synthetic construct
  source 1..75: mol_type = other DNA
ctgatgtcggtgcattacctcttaccggtggtacattatctggaggtttgacatcttctggcgagatcatttcaa

SEQ ID NO: 888970 - DNA, 75 bp, synthetic construct
  source 1..75: mol_type = other DNA
gcaaacagcgagaaacatcaatggtgttaagtttgatggctcaggcgatatcaacattaatacattggtatctcg

SEQ ID NO: 888971 - DNA, 75 bp, synthetic construct
  source 1..75: mol_type = other DNA
ccattactcgttacaaccacagcacccattatgcaatggcagtctggcagttaggacaggctgtggcgctggcgc

SEQ ID NO: 888972 - DNA, 75 bp, synthetic construct
  source 1..75: mol_type = other DNA
aaacccccgcacgttgcaggtatgcacctgacaacatcacgggggctaatcttgaacccaaacaactcaagaata

SEQ ID NO: 888973 - DNA, 75 bp, synthetic construct
  source 1..75: mol_type = other DNA
agacgctggcaggcgttggtggagaataatcatttcttaagcagcgaccatctacataacatcaccgaagtggcg

SEQ ID NO: 888974 - DNA, 75 bp, synthetic construct
  source 1..75: mol_type = other DNA
tcctttgccggggcgatgggctacggacagtttatgccgtcgtcttacaaacaatatgcggtagatttcagcggc

SEQ ID NO: 888975 - DNA, 75 bp, synthetic construct
  source 1..75: mol_type = other DNA
gcagtgactaccgcttccttgtgcggggcgggatgctttaccatacttgcccctggttgaatctgttaaatggac

SEQ ID NO: 888976 - DNA, 75 bp, synthetic construct
  source 1..75: mol_type = other DNA
tcctcgatgcgctggcaacgctgtcatttaactacccacgccgcgcggagtatttctctggcgagctggaaacct

SEQ ID NO: 888977 - DNA, 75 bp, synthetic construct
  source 1..75: mol_type = other DNA
tcgctacgtcgcctcgtactactgataatgctcatcttgatgtgcaccattctgaagaggaactgggttatatct

SEQ ID NO: 888978 - DNA, 75 bp, synthetic construct
  source 1..75: mol_type = other DNA
caatttaatacctcaattattgtatatttaattgacccaaaatactttgctgatctgccgacgtcacagttttgg

SEQ ID NO: 888979 - DNA, 75 bp, synthetic construct
  source 1..75: mol_type = other DNA
atcgatccacgacagtttttcactaatgaacaacagcagggtggattctttgatcctctgaaaggagcgagcaaa

SEQ ID NO: 888980 - DNA, 75 bp, synthetic construct
  source 1..75: mol_type = other DNA
gctgtttttccatattcacagccgtgagattgccgatcatatgggcgtgtatctgggagacggtcagtttatcga

SEQ ID NO: 888981 - DNA, 75 bp, synthetic construct
  source 1..75: mol_type = other DNA
gaggccccagatgtacactgatcgttttcattgatgatgccaccagtgcgttgatggcgttgcgttttgtgcctg

SEQ ID NO: 888982 - DNA, 75 bp, synthetic construct
  source 1..75: mol_type = other DNA
ggtagagcgcgccaatcagacactacaggacaggctggtcaaagaaatgcggcttcagaatatcagtgatattga

SEQ ID NO: 888983 - DNA, 75 bp, synthetic construct
  source 1..75: mol_type = other DNA
tcggcgttgaaacccgctgggggcgcgtgatggggaaaactcgcatcctcgatgcgctggcaacgctgtcattta

SEQ ID NO: 888984 - DNA, 75 bp, synthetic construct
  source 1..75: mol_type = other DNA
ccctgttacatgaggtcatggcagaagcgcgtgcagaaatcagtcttgtccgcaatgccctgtcagcaatccggc

SEQ ID NO: 888985 - DNA, 75 bp, synthetic construct
  source 1..75: mol_type = other DNA
ctgcgtggcgctggaagattctgtaaacggtatgatcgcctctaaagcagcccgtatgcgttccatcgtcgttcc

SEQ ID NO: 888986 - DNA, 75 bp, synthetic construct
  source 1..75: mol_type = other DNA
tcgtaacgagctaccggacaccttaggtttacgcatcgatatggtggttgatctgtggtatgcccggcaaccgtg

SEQ ID NO: 888987 - DNA, 75 bp, synthetic construct
  source 1..75: mol_type = other DNA
ctcaaggcgagtgacagacgctggcaggcgctggcggaaaacaaccactttttaagcagcgaccatctgcataac

SEQ ID NO: 888988 - DNA, 75 bp, synthetic construct
  source 1..75: mol_type = other DNA
aaaacgatcgggatcatttactcgcttttacgcttaatgttccctttagtcattggatgcgtacagatagtcagt

SEQ ID NO: 888989 - DNA, 75 bp, synthetic construct
  source 1..75: mol_type = other DNA
acagtaaatctcagtggcgacatgccagtgccagctacagcatgtcacacgatctcaacggtcggatgaccaatc

SEQ ID NO: 888990 - DNA, 75 bp, synthetic construct
  source 1..75: mol_type = other DNA
accaagtaaaaacaagaactttgaaatagtaaaagaacttaattctattgggttgtttaagttcccggttacaac

SEQ ID NO: 888991 - DNA, 75 bp, synthetic construct
  source 1..75: mol_type = other DNA
gggacgtctatttcaaccataaaggcgttcgcccttttaaatcgtcgtcatcacttattctgaataaaagcaaag

SEQ ID NO: 888992 - DNA, 75 bp, synthetic construct
  source 1..75: mol_type = other DNA
tgaaattcactaggattgctctggcaacactgattatggtggtggcaactagtgcacgggcggccaccaccgcca

SEQ ID NO: 888993 - DNA, 75 bp, synthetic construct
  source 1..75: mol_type = other DNA
ctggggcttctgacacagggagacagcgggaaggagcatgctcccctgaatataacctggacgtgtgagggagac

SEQ ID NO: 888994 - DNA, 75 bp, synthetic construct
  source 1..75: mol_type = other DNA
ctgccctgataatgacagtgatgactagcagcgggcaggctgctactgtcatcactgcggcagcactgacgatta

SEQ ID NO: 888995 - DNA, 75 bp, synthetic construct
  source 1..75: mol_type = other DNA
attcaccgcctggagcagcagctaggtaagccttatatctgggggggcacgcggcctgataaaggcttcgactgt

SEQ ID NO: 888996 - DNA, 75 bp, synthetic construct
  source 1..75: mol_type = other DNA
attctagaaaatttccagcgtgaaagtagctggtatatcaaacagattgatattacccgtgaacctgctgcaaag

SEQ ID NO: 888997 - DNA, 75 bp, synthetic construct
  source 1..75: mol_type = other DNA
aaaacctcatcagcacccgcataatcagtgaactcgaattcgctcatggtctgacagtgaccaagacagcctctt

SEQ ID NO: 888998 - DNA, 75 bp, synthetic construct
  source 1..75: mol_type = other DNA
tctgcgaaaggatatacagaccaaggaagttcctgctcctgttcctgttcctgttcctgttcctgttcctgttcc

SEQ ID NO: 888999 - DNA, 75 bp, synthetic construct
  source 1..75: mol_type = other DNA
tgcgcaattttattttattagcgcaaaccaataatattgctcgggcagcagaaaagattcatatgacggcttcac

SEQ ID NO: 889000 - DNA, 75 bp, synthetic construct
  source 1..75: mol_type = other DNA
gaccactctactcctactcctactcctgctcctgctcctgctcctgctcctgctcctgctcctgctcctgctcct

SEQ ID NO: 889001 - DNA, 75 bp, synthetic construct
  source 1..75: mol_type = other DNA
aagaaagatttcccgtaatgaacagatgctttcagaacggactggccttctttcccctaaagaagctctccaaca

SEQ ID NO: 889002 - DNA, 75 bp, synthetic construct
  source 1..75: mol_type = other DNA
gtaagaccattcttcacaaaacccacacgaccttctcaaatatctactcaatgaaacctttaaacaacgtgataa

SEQ ID NO: 889003 - DNA, 75 bp, synthetic construct
  source 1..75: mol_type = other DNA
aacaagtacaccatcggggagctgatgaatgcggccgacccttattcactgatcttcagccgtccgagtccgctg

SEQ ID NO: 889004 - DNA, 75 bp, synthetic construct
  source 1..75: mol_type = other DNA
aatactctcagctggccagctatgcagaaaataacagtgccaatattaaccagaactactctcaggagtttgtcg

SEQ ID NO: 889005 - DNA, 75 bp, synthetic construct
  source 1..75: mol_type = other DNA
cgtgacggacagcggcagccataccgacaatgcatcatcatcccttgctaaccaactgtcttcaacattctccag

SEQ ID NO: 889006 - DNA, 75 bp, synthetic construct
  source 1..75: mol_type = other DNA
ggccgaagtggctcctcgcacgggaccagttccgatctgacccggcagggcgggaccagtaaagggttcagtgct

SEQ ID NO: 889007 - DNA, 75 bp, synthetic construct
  source 1..75: mol_type = other DNA
accagtgcgtccattgccgctaacacactgccggtgatgtacagcgtactgttggggatgacgatagcgctgttc

SEQ ID NO: 889008 - DNA, 75 bp, synthetic construct
  source 1..75: mol_type = other DNA
catgaacttctatctgcagggtaagctcagtggcacagcagtaacgctggctaattttgaccaggtacagaatac

SEQ ID NO: 889009 - DNA, 75 bp, synthetic construct
  source 1..75: mol_type = other DNA
aaaattgctgaactcgaactgcgactcagaaaagacagacgaaatgagatcgttgagaagattctccaaaagaat

SEQ ID NO: 889010 - DNA, 75 bp, synthetic construct
  source 1..75: mol_type = other DNA
cggtcgttctgttggctgggttaagtctgaggttgtggcgtgggtcaaaaaccgcgaacgcattaattcaggcaa

SEQ ID NO: 889011 - DNA, 75 bp, synthetic construct
  source 1..75: mol_type = other DNA
ctctagcgttcgaacgcactgatttcgaccaggttcgttcacttatggaaaatagcgatcgctgccaggatatac

SEQ ID NO: 889012 - DNA, 75 bp, synthetic construct
  source 1..75: mol_type = other DNA
ggcataagaactttatcaatgtcgtgaagtatgtattgaagcctggttctcgccatagaagcaccccaacggtta

SEQ ID NO: 889013 - DNA, 75 bp, synthetic construct
  source 1..75: mol_type = other DNA
ccgaagaacgcattcagattctgaaagagcatggcgaaccgtatgatcgccgtatacgcgaacatgagtgtgcca

SEQ ID NO: 889014 - DNA, 75 bp, synthetic construct
  source 1..75: mol_type = other DNA
cgtaaatattgtcatgaactatatccgtaacctggatagtgaaacaggggcaatggtgcgcctgctggaagatgg

SEQ ID NO: 889015 - DNA, 75 bp, synthetic construct
  source 1..75: mol_type = other DNA
tcatccaccagccagctatcaactcgcgccctggaagggatttttgaagcaactcaccgattgatttacggggct

SEQ ID NO: 889016 - DNA, 75 bp, synthetic construct
  source 1..75: mol_type = other DNA
aatactgccagtgaacgacgaactgacatcgcaaaaccagcatggcacaactcccttagacttcctaagaatgat

SEQ ID NO: 889017 - DNA, 75 bp, synthetic construct
  source 1..75: mol_type = other DNA
cctgctcctgctcctgctcctgctcctgctcctgctcctgctcctgctcctgctcctgctcctgcaatagttttg

SEQ ID NO: 889018 - DNA, 75 bp, synthetic construct
  source 1..75: mol_type = other DNA
tagaaggcttgcagagcttctccgaagctatggtaagagcattcttcacaagcccctccctggattctcaaatct

SEQ ID NO: 889019 - DNA, 75 bp, synthetic construct
  source 1..75: mol_type = other DNA
gaggtaagagcttcgctggtgtagtgctttacgcattaaaaccagcttctcatcataaaaaagatccgatagtga

SEQ ID NO: 889020 - DNA, 75 bp, synthetic construct
  source 1..75: mol_type = other DNA
cgtggtaaaagctatgtggatgtagcgatgcgatggatagaaaccattccctgggtagacaaaatagttaatacc

SEQ ID NO: 889021 - DNA, 75 bp, synthetic construct
  source 1..75: mol_type = other DNA
tatcaagaggctggaagaagcagaagtatcctggaaggccaatattgcctctaccggtaaaatgaacggcttctc

SEQ ID NO: 889022 - DNA, 75 bp, synthetic construct
  source 1..75: mol_type = other DNA
gcactggatgaagtcatggccacgctgaccacgccggcacgcagcagtgttatcagcattgttaacggcaactga

SEQ ID NO: 889023 - DNA, 75 bp, synthetic construct
  source 1..75: mol_type = other DNA
agacaacgccgcagatgcagctgccgcacgcaaggcgaaggcgctgccgttcggcgggcggcttgacccttataa

SEQ ID NO: 889024 - DNA, 75 bp, synthetic construct
  source 1..75: mol_type = other DNA
ctgatgcaggacgcagctcactgagccgcgatgaagctgcgctgatatccgccacactgcgcgaagctacccgta

SEQ ID NO: 889025 - DNA, 75 bp, synthetic construct
  source 1..75: mol_type = other DNA
gtgactgataaacgcaaaaaacgcgctgatgccgggcgcagcgccctgacccgcgacgaagccgcgctgatatct

SEQ ID NO: 889026 - DNA, 75 bp, synthetic construct
  source 1..75: mol_type = other DNA
gtgactgataaacgcaaaaaacgcgcagatgccggtcgcagcgccctgacccgcgacgaagccgcgctgatatct

SEQ ID NO: 889027 - DNA, 75 bp, synthetic construct
  source 1..75: mol_type = other DNA
gcactggatgaagtcatggccacgctgaccacgccggctcgcagcagggttatcagcattgttaacggcaactga

SEQ ID NO: 889028 - DNA, 75 bp, synthetic construct
  source 1..75: mol_type = other DNA
atgaatattcttgatcgagttattgcgccgttttcacctcagagggcattaaatcgagctttggcaagaaaacgg

SEQ ID NO: 889029 - DNA, 75 bp, synthetic construct
  source 1..75: mol_type = other DNA
tagttgcttttgctcaggctgcgcggcaggccgggcatggtacacgaggcgcaatctatgctgccgcctgcgcgg

SEQ ID NO: 889030 - DNA, 75 bp, synthetic construct
  source 1..75: mol_type = other DNA
attgtcatcgaccaaccgagcagcttcctggctatctccgatctggtggttcgcgttcttgatggcaagattttc

SEQ ID NO: 889031 - DNA, 75 bp, synthetic construct
  source 1..75: mol_type = other DNA
aagaagtcaaagctgcaaaactgcgtgttgaggaaacattctctacccgtgaaaaagaagcggctgaaatgtcag

SEQ ID NO: 889032 - DNA, 75 bp, synthetic construct
  source 1..75: mol_type = other DNA
aacgtattcccgcatatgggagtaaaacaggaagaagaaatattctgcatgtcatgcaggattttgaaaggcctg

SEQ ID NO: 889033 - DNA, 75 bp, synthetic construct
  source 1..75: mol_type = other DNA
aaatcgagctttggcaagaaaacggttagaagcacttgaaggtattaataaccttggatattcacgtcatggtgc

SEQ ID NO: 889034 - DNA, 75 bp, synthetic construct
  source 1..75: mol_type = other DNA
tgcacccggaacaactggatgcacctgcaccgcataccgaagtggccagtctgcagcccaatcatgtctggcaga

SEQ ID NO: 889035 - DNA, 75 bp, synthetic construct
  source 1..75: mol_type = other DNA
acaccgcgggtatgacgaaaaacatgtgccgctcactgggcatcgacctgatagcgcacaagccgcataacgccc

SEQ ID NO: 889036 - DNA, 75 bp, synthetic construct
  source 1..75: mol_type = other DNA
gcaggctcccgttatctggactcagccagcccggcagtaccagttggtgagggagaggtgatggtccgggtaccg

SEQ ID NO: 889037 - DNA, 75 bp, synthetic construct
  source 1..75: mol_type = other DNA
ttgctgccagcctcctgccttcctgcgtactggcctggaacacgccgggagaagatttcagcggagagcttaagc

SEQ ID NO: 889038 - DNA, 75 bp, synthetic construct
  source 1..75: mol_type = other DNA
cgtgctgcacggcgtgccgaaaatactctaccttgatcccggttcggcgaacaccgctggcatgacgaaaaacat

SEQ ID NO: 889039 - DNA, 75 bp, synthetic construct
  source 1..75: mol_type = other DNA
acgagtttggctttgctgaaagcgcggcggtatttggcgaaagttacaaaaccctgccggaaacaccggcgcagg

SEQ ID NO: 889040 - DNA, 75 bp, synthetic construct
  source 1..75: mol_type = other DNA
cggacggcgtaccggaagccgctctggatgaggtcatggtcaccctgaccactccggcccgcaacagcgttatca

SEQ ID NO: 889041 - DNA, 75 bp, synthetic construct
  source 1..75: mol_type = other DNA
gccacactgcgtgaggccacccgcaagaacggtaagcgtctctattccatcgcggatgcagtggaaaccctgcgg

SEQ ID NO: 889042 - DNA, 75 bp, synthetic construct
  source 1..75: mol_type = other DNA
ggcctatatgccgaagcgtggtcaggcctctgacgtacgcgggccgcgcactgaacaacgtcccatgactcatgt

SEQ ID NO: 889043 - DNA, 75 bp, synthetic construct
  source 1..75: mol_type = other DNA
tgacccgtataaacatatcgacgacaccacacttccggcctacctgccgaagcgaggccaggcctctgacgtacg

SEQ ID NO: 889044 - DNA, 75 bp, synthetic construct
  source 1..75: mol_type = other DNA
tgtatgacgacctgaatgcaaatggtctgcctggtgaaaacactgccatgaaggcttctgatattccgggcgttc

SEQ ID NO: 889045 - DNA, 75 bp, synthetic construct
  source 1..75: mol_type = other DNA
ctggctgaagattactgctgagcagctgaaaaaagcgccttccgttgaggtatgtcgtgaactggctgtggcggc

SEQ ID NO: 889046 - DNA, 75 bp, synthetic construct
  source 1..75: mol_type = other DNA
atagcacacaagccgcataacgcccgcgccaccggacaggtggaaaaggcgcgtgacattatcgaacgcaagctg

SEQ ID NO: 889047 - DNA, 75 bp, synthetic construct
  source 1..75: mol_type = other DNA
acgcccgtatgtgctggttggtgcatttgttgtcgggatgctgctgacgccgccggatgtcttctcgcaaacgct

SEQ ID NO: 889048 - DNA, 75 bp, synthetic construct
  source 1..75: mol_type = other DNA
acagcttgttcgcctcgttctttgcggtactggttattctgatgacgactatctccactaacgccaccggtaata

SEQ ID NO: 889049 - DNA, 75 bp, synthetic construct
  source 1..75: mol_type = other DNA
tgataaggtttgatatgtttgaaaataaattggatgggacatctattaaaaacacaatgaatgcatccgttttat

SEQ ID NO: 889050 - DNA, 75 bp, synthetic construct
  source 1..75: mol_type = other DNA
ttgcaactctcaaacagcagaatgatagatcgttagataaaaagaatccgggggatacgctgtcttattcgttag

SEQ ID NO: 889051 - DNA, 75 bp, synthetic construct
  source 1..75: mol_type = other DNA
actggcatcttcagagtcagtccgctttgctggcacatctctgtcagctggaaggtgaactggcgatacttcgcg

SEQ ID NO: 889052 - DNA, 75 bp, synthetic construct
  source 1..75: mol_type = other DNA
gctggggcgtgaaattaatcatgaaatctggactgacagtatcagtaccggaaagctgacggccggagcggatgc

SEQ ID NO: 889053 - DNA, 75 bp, synthetic construct
  source 1..75: mol_type = other DNA
atgtactcacccttacttgttcattattcagcgctgcagacgcagtctgctctgctggcgcatatcagccagctg

SEQ ID NO: 889054 - DNA, 75 bp, synthetic construct
  source 1..75: mol_type = other DNA
cagaccgtgagagtctgcagtgggtttgcgtgaagggtataccgccgaaggaagatgacaaatgggcggtagatg

SEQ ID NO: 889055 - DNA, 75 bp, synthetic construct
  source 1..75: mol_type = other DNA
tcagtcagaggtattattagaagaccaaaaaacaccagcaccttttatcataacgccaccgttatttcggcttga

SEQ ID NO: 889056 - DNA, 75 bp, synthetic construct
  source 1..75: mol_type = other DNA
cataacatcaccgaagtggcgattcaccgcctggagcagcagcttggcaagccttacgtctggggcggcacgcgg

SEQ ID NO: 889057 - DNA, 75 bp, synthetic construct
  source 1..75: mol_type = other DNA
ttgttccgtcttgatggtcagcagtcgagtcgtctgcgtattgtcaggacgggcggggagtttccgtcagaccgt

SEQ ID NO: 889058 - DNA, 75 bp, synthetic construct
  source 1..75: mol_type = other DNA
tttattgaagcctataacaaccggttcgctacgtcgcctcgtactactgataatgctcatcttgatgtgcaccat

SEQ ID NO: 889059 - DNA, 75 bp, synthetic construct
  source 1..75: mol_type = other DNA
aaggccgctacgctgattttggacctacgcttgcgtgcgaaaaattgcgcgagatacacggcttgtgtttatcca

SEQ ID NO: 889060 - DNA, 75 bp, synthetic construct
  source 1..75: mol_type = other DNA
acaatacgcttaccaatttgagtggaaaggatgtagctggtcttctcgcataccttggtttgggagaattatctc

SEQ ID NO: 889061 - DNA, 75 bp, synthetic construct
  source 1..75: mol_type = other DNA
atgctcgacgactacggcggcagcctgagcgaactggcgcgggagcaactgcccgctgcggaacaggcggcgctg

SEQ ID NO: 889062 - DNA, 75 bp, synthetic construct
  source 1..75: mol_type = other DNA
actggcccgatgaagtcgagattgttgatggcggcactcagggactgaacttgctggggtatgtcgaaagcgcca

SEQ ID NO: 889063 - DNA, 75 bp, synthetic construct
  source 1..75: mol_type = other DNA
aatcggtacgaagaagcggctgtagggattaaaaaatccatcgaagccggaacctctaaactgaacggtttaccg

SEQ ID NO: 889064 - DNA, 75 bp, synthetic construct
  source 1..75: mol_type = other DNA
ctgtctcaactatgactgtctgtcgatggaaaattatgaaggcgttcgcttacgccagtaccggatgagcctgga

SEQ ID NO: 889065 - DNA, 75 bp, synthetic construct
  source 1..75: mol_type = other DNA
gccagcagcagaacagttggcgctggcgcaactggcagagtggggaatcgtgccgcatctggcagaggaatcacg

SEQ ID NO: 889066 - DNA, 75 bp, synthetic construct
  source 1..75: mol_type = other DNA
ttccggcttatctcagcgcgaagaaaatgagcctgcaccagaacagtttctccgaagtgctggcgctggcagata

SEQ ID NO: 889067 - DNA, 75 bp, synthetic construct
  source 1..75: mol_type = other DNA
tgattggcatcaccgccgtatttgccctctgtgccgtggtttacaccttcttcgccacgccgatttatagtgccg

SEQ ID NO: 889068 - DNA, 75 bp, synthetic construct
  source 1..75: mol_type = other DNA
acaaaaactacaccctgatcagtgatggtggctttagcgcccgtgggcaagcaggccagatgctgaaaaaagagg

SEQ ID NO: 889069 - DNA, 75 bp, synthetic construct
  source 1..75: mol_type = other DNA
cgcggcatcgaaagcccgcaggtgctggaagaacacggtatcagcgtctatgccagcatcccgctgtcggagtgg

SEQ ID NO: 889070 - DNA, 75 bp, synthetic construct
  source 1..75: mol_type = other DNA
ttttcataaacgttggtttgggagaattatctctggctggcactgcatcgggtgtcattggcctgaatgggtatg

SEQ ID NO: 889071 - DNA, 75 bp, synthetic construct
  source 1..75: mol_type = other DNA
atcacaaaaagcggctttcgtggtttttccagcgtagcgactgccgtaaatcctgtatcgggctgttatgttgct

SEQ ID NO: 889072 - DNA, 75 bp, synthetic construct
  source 1..75: mol_type = other DNA
aggtctatatgcaactgctgaataaagagcaggagctgaaaatcaccgaggccagcaccgtcggcgatgtgcgca

SEQ ID NO: 889073 - DNA, 75 bp, synthetic construct
  source 1..75: mol_type = other DNA
cgttcagggatgctttccttaatggatgcacaggcccgtgatacatggcaccggtcactggagcacgataatttt

SEQ ID NO: 889074 - DNA, 75 bp, synthetic construct
  source 1..75: mol_type = other DNA
cgggcaacaggcagatcgacttgctgatctggaaagaatgctacacctgttcagcggcaaaccgatccccgacaa

SEQ ID NO: 889075 - DNA, 75 bp, synthetic construct
  source 1..75: mol_type = other DNA
atcgtcaacaatctggtgagatgggaccggtggggatttcatcttatcaccggacaacagactgaccgactcgcc

SEQ ID NO: 889076 - DNA, 75 bp, synthetic construct
  source 1..75: mol_type = other DNA
tgagcacatttgaacaactgcaccagaataacgatgaagtgtttgaccggggagtgatcaacgtcttcagagggc

SEQ ID NO: 889077 - DNA, 75 bp, synthetic construct
  source 1..75: mol_type = other DNA
ccgggaaaacatcacccttcgtctggatgatcacatccagtctgttcagggtaaagaggactatgaagacgagat

SEQ ID NO: 889078 - DNA, 75 bp, synthetic construct
  source 1..75: mol_type = other DNA
ccggcaactgactgaaatctcagtactgacaaaaagcattggtggtaaaagcgccccggactgggccatgaaaca

SEQ ID NO: 889079 - DNA, 75 bp, synthetic construct
  source 1..75: mol_type = other DNA
gttcaacatcagatactttaagaagggctccgcacacatcacgttcaggaaaccagaactggttgatcggctaaa

SEQ ID NO: 889080 - DNA, 75 bp, synthetic construct
  source 1..75: mol_type = other DNA
caggcccgtgatacatggtaccggtcactggagtacgataattttccggaaatcagcgaagcgaacattctgagc

SEQ ID NO: 889081 - DNA, 75 bp, synthetic construct
  source 1..75: mol_type = other DNA
ccgggggaatatcaccattaatctggatgaccacatacagtctgttcagggtaaagaggactatgaagacgagat

SEQ ID NO: 889082 - DNA, 75 bp, synthetic construct
  source 1..75: mol_type = other DNA
atgacagaaagtattggcggtaaaactgctctggactgggccatgaaacaggattttcgctgcggctgctggctg

SEQ ID NO: 889083 - DNA, 75 bp, synthetic construct
  source 1..75: mol_type = other DNA
cgaactctggcgtgacctgatgcaacgttccgggctgctgtcattaatggatgcacaggcccgtgatacatggta

SEQ ID NO: 889084 - DNA, 75 bp, synthetic construct
  source 1..75: mol_type = other DNA
ggggtgatcaacgtcttcaggggactgagctggaattacaaaaccaattgcccctgcaagtttggcagtaaaatt

SEQ ID NO: 889085 - DNA, 75 bp, synthetic construct
  source 1..75: mol_type = other DNA
tgagcacatttgaacaactgcaccagaataacgatgatgtgtttgaccggggagtgatcaacgtcttcatagggc

SEQ ID NO: 889086 - DNA, 75 bp, synthetic construct
  source 1..75: mol_type = other DNA
aatactttaagaaaggctcagtacacatcacgttcaggaaaccagaactggttgacaggcttaatgatattattg

SEQ ID NO: 889087 - DNA, 75 bp, synthetic construct
  source 1..75: mol_type = other DNA
tgagcacatttgaacaactgcaccagaataaggatgaagtgtttgagcggggggtgatcaacctcttcaaagggc

SEQ ID NO: 889088 - DNA, 75 bp, synthetic construct
  source 1..75: mol_type = other DNA
cacatcctggctgtacgaaagagtacactgctgcaaatcgacacgcttatccggcaactgacagaaatctcagca

SEQ ID NO: 889089 - DNA, 75 bp, synthetic construct
  source 1..75: mol_type = other DNA
gtggctggaagcatccagacgctgacgcgaattaaacgcaaagtgcgtctggctgctggcctgaatagcgaaaat

SEQ ID NO: 889090 - DNA, 75 bp, synthetic construct
  source 1..75: mol_type = other DNA
atgacagaaagtattagaggtaaaacggctctggactgggccatgaaacaggattttcgctgcggttgctggctg

SEQ ID NO: 889091 - DNA, 75 bp, synthetic construct
  source 1..75: mol_type = other DNA
gatgaggtgtttgagcgaggggtgatcaacgtcttcagagggctgaactggaattacaaaaccaattgcccctgt

SEQ ID NO: 889092 - DNA, 75 bp, synthetic construct
  source 1..75: mol_type = other DNA
tgagcacatttgaacaactgcaccagaataacgatgaggtgtttgaccggggagtgatcaacgtcttcaaagggc

SEQ ID NO: 889093 - DNA, 75 bp, synthetic construct
  source 1..75: mol_type = other DNA
tgagcacatttgaacaactgcaccagaataacgatgacgtgtttgaccggggcgtgatcaacgtcttcagagggc

SEQ ID NO: 889094 - DNA, 75 bp, synthetic construct
  source 1..75: mol_type = other DNA
tgagcacatttgaacaactgcaccagaataacgatgatgtgtttgaccggggtgtgatcaacgtcttcagagggc

SEQ ID NO: 889095 - DNA, 75 bp, synthetic construct
  source 1..75: mol_type = other DNA
tgagcacatttgaacaactgcaccagaataacgatgaggtgtttgaccggggggtgatcaacgtcttcagagggc

SEQ ID NO: 889096 - DNA, 75 bp, synthetic construct
  source 1..75: mol_type = other DNA
tgagcacatttgaacaactgcaccagaataacgatgaggtgtttgaccggggcgtgatcaacgtcttcacagggc

SEQ ID NO: 889097 - DNA, 75 bp, synthetic construct
  source 1..75: mol_type = other DNA
tgagcacatttgaacaactgcaccagaataacgatgaggtgtttgaccggggtgtgatcaacgtcttcatagggc

SEQ ID NO: 889098 - DNA, 75 bp, synthetic construct
  source 1..75: mol_type = other DNA
atggagaaacctgaaacggcaatgaaagccatcacccgcaaccttgaccgtgaaatctggcgtgacctgatgcaa

SEQ ID NO: 889099 - DNA, 75 bp, synthetic construct
  source 1..75: mol_type = other DNA
tagcccatgtaagttcgggaaaaagatcatcgttacggggctggtcaaatgtgatcggtggggatttgggcttaa

SEQ ID NO: 889100 - DNA, 75 bp, synthetic construct
  source 1..75: mol_type = other DNA
ggtgccatccagcgcgggctgttgtcgctggaacagcaaggcgcagcacacttctttggtgagccgatgctggat

SEQ ID NO: 889101 - DNA, 75 bp, synthetic construct
  source 1..75: mol_type = other DNA
aaccagagctggttgacaggcttaatgatattattgccagacactacccggaagccctggcaagcacagtgaaca

SEQ ID NO: 889102 - DNA, 75 bp, synthetic construct
  source 1..75: mol_type = other DNA
cgacagcggcagacctgatgttacagctttcaacggcaaaacgccaaaacaaactgaaacactatttatcacgtt

SEQ ID NO: 889103 - DNA, 75 bp, synthetic construct
  source 1..75: mol_type = other DNA
accagaacaaagatgaagtgtttgaacggggagtgatcaacgtcttcaaagggctgagctgggattacaaaacca

SEQ ID NO: 889104 - DNA, 75 bp, synthetic construct
  source 1..75: mol_type = other DNA
agtacatcggagataacgccaaatcattccagaatcagtatggcaatatcagtagcgcatctgttggtgcaatcc

SEQ ID NO: 889105 - DNA, 75 bp, synthetic construct
  source 1..75: mol_type = other DNA
atgagcgaaccacttttaattgcacgcacgcctgacacggaactgtttttattacccgctatggctaaccgtcac

SEQ ID NO: 889106 - DNA, 75 bp, synthetic construct
  source 1..75: mol_type = other DNA
atccccccgcgaaagggaaagaggtagcggtagatgacggcattcttggtggattgaaggatattttgttcggca

SEQ ID NO: 889107 - DNA, 75 bp, synthetic construct
  source 1..75: mol_type = other DNA
gggcgacggtttcagacctggggccgctgttgctggcgcgactgttgaatctcaacgatgtgcaatctggcgtgc

SEQ ID NO: 889108 - DNA, 75 bp, synthetic construct
  source 1..75: mol_type = other DNA
tgaaaggtgatttaacgggagtagcggaggaaggtacatcttcggaaaaactgctcgcaaggcttaaaaatatcg

SEQ ID NO: 889109 - DNA, 75 bp, synthetic construct
  source 1..75: mol_type = other DNA
acccaatccagcgtttgatacagaaaaggcgatccaggagctgggaaccggcgaagcgttgatctcatttcttga

SEQ ID NO: 889110 - DNA, 75 bp, synthetic construct
  source 1..75: mol_type = other DNA
gaataaggatgaagtgtttgagcggggagtgctcaacgtcttcaaagggctgagctgggattacaaaaccaactc

SEQ ID NO: 889111 - DNA, 75 bp, synthetic construct
  source 1..75: mol_type = other DNA
gagtgctatgaatatgaagatgagatgttcagcatcagatactttaagaagggctccgcgcacatcacgttcaga

SEQ ID NO: 889112 - DNA, 75 bp, synthetic construct
  source 1..75: mol_type = other DNA
gatcaacgtcttcaggggactgaactggaattacaaaaccaatttaccctgcaaatttggcagtaaaattatcgt

SEQ ID NO: 889113 - DNA, 75 bp, synthetic construct
  source 1..75: mol_type = other DNA
attatcgtcaacaatctggtgagatgggaccggtggggatttcatcttatcaccggacaacaggctgaccgactc

SEQ ID NO: 889114 - DNA, 75 bp, synthetic construct
  source 1..75: mol_type = other DNA
atgtctgatatcacagcctcccgtccggaagtggtcaacgggcatacggacgttatttgctcaacctcagtcagc

SEQ ID NO: 889115 - DNA, 75 bp, synthetic construct
  source 1..75: mol_type = other DNA
tcagcggcaaaccgatccccgacaaccgggaaaacatcactattcgtctggatgatcacattcagtctgttcagg

SEQ ID NO: 889116 - DNA, 75 bp, synthetic construct
  source 1..75: mol_type = other DNA
gatgggaccggtggggatttcatcttatcaccggacaacaggctgaccgactcgccgatctggaaagaatgttgc

SEQ ID NO: 889117 - DNA, 75 bp, synthetic construct
  source 1..75: mol_type = other DNA
attcaccctgcaaatttggcagtaaaattatcgtcaacaatctggtgaggtgggaccggtgggggtttcatctta

SEQ ID NO: 889118 - DNA, 75 bp, synthetic construct
  source 1..75: mol_type = other DNA
atggatgcacaagcccgtgatacatggtaccggtcactggagtacgataattttccggaaatcagcgaagcgaat

SEQ ID NO: 889119 - DNA, 75 bp, synthetic construct
  source 1..75: mol_type = other DNA
tctggcgtgacctgatgcaacgttcagggatgctttccttaatggatgcacaggcccgtgatacatggtaccggt

SEQ ID NO: 889120 - DNA, 75 bp, synthetic construct
  source 1..75: mol_type = other DNA
aactccccctgtaaatttggcagtaaaattatcgtcaacaatctggtgaggggagaccggtggggattgcatctt

SEQ ID NO: 889121 - DNA, 75 bp, synthetic construct
  source 1..75: mol_type = other DNA
cactttgtctaattcgtcagattctgaccagacggttcaggctgtacgcttactcattaatggatgcacaggcac

SEQ ID NO: 889122 - DNA, 75 bp, synthetic construct
  source 1..75: mol_type = other DNA
aattatcgtcaacaatctggtgaggtgggaccggtgggggtttcatcttatcaccgggcaacaggccgatcgact

SEQ ID NO: 889123 - DNA, 75 bp, synthetic construct
  source 1..75: mol_type = other DNA
aggcgctggcgaagaaagcgggcggcagctttaaaacagtgaatgaccgtatccatattacaaaacggttcagtg

SEQ ID NO: 889124 - DNA, 75 bp, synthetic construct
  source 1..75: mol_type = other DNA
ggtttaaccagaaagaggcgttagccatggtggcgatggatctggggcatggtgacgggcgtgggcggtatgtgg

SEQ ID NO: 889125 - DNA, 75 bp, synthetic construct
  source 1..75: mol_type = other DNA
ggagagacgcgcttaaccgtagttttcggcaccaaaggcgggcggccccgcgaaacggtgattctggatgttggc

SEQ ID NO: 889126 - DNA, 75 bp, synthetic construct
  source 1..75: mol_type = other DNA
agcgactggcacagcaggcgggcggcagccataagaccgttcacgaccgtattaagctggtgcagcggttttgtg

SEQ ID NO: 889127 - DNA, 75 bp, synthetic construct
  source 1..75: mol_type = other DNA
aatgcgttggttgtggcagacgatcgccacggcaggctgattgataagtcagatctgaaaaccgccatgaaatac

SEQ ID NO: 889128 - DNA, 75 bp, synthetic construct
  source 1..75: mol_type = other DNA
aaagcgaggcatatcgagggctatatccgtgagcggctggcgcagggcatcacaaagcgttccctgcaaaatgag

SEQ ID NO: 889129 - DNA, 75 bp, synthetic construct
  source 1..75: mol_type = other DNA
gcaccggaactggtacataccctgtgggaagacttacgtaaaacgcttccagagatcggagcagttccggctatt

SEQ ID NO: 889130 - DNA, 75 bp, synthetic construct
  source 1..75: mol_type = other DNA
tttggccttaactatcacattgcggtggtgctggtcggcgtgctgatgatgatgtacgtcctgttcggcggcatg

SEQ ID NO: 889131 - DNA, 75 bp, synthetic construct
  source 1..75: mol_type = other DNA
atgggctacttctatattctgacctttattatcggcttcggcgcgatcatgctggttggtgcgaatccggaatat

SEQ ID NO: 889132 - DNA, 75 bp, synthetic construct
  source 1..75: mol_type = other DNA
tagaaaactgcattctggttgatgactcagttgccggtgcgcaatctggtatcgacgcaggtatggaagtgttct

SEQ ID NO: 889133 - DNA, 75 bp, synthetic construct
  source 1..75: mol_type = other DNA
ttcatgcagcacgtccacacagtgaagctattcgcgacgctcaacgaaaaaacctaaagttccggtacatgctgt

SEQ ID NO: 889134 - DNA, 75 bp, synthetic construct
  source 1..75: mol_type = other DNA
aagcgcgctgtatgccgttttaagtgcgttgttattaatgaagttctcttttgatgtcgttcgcctgcgaatgca

SEQ ID NO: 889135 - DNA, 75 bp, synthetic construct
  source 1..75: mol_type = other DNA
aaggcgcggtatattgagggatatgttcgtgaacgactggcgcagggtatcacgaagcgttccctgcaaaatgag

SEQ ID NO: 889136 - DNA, 75 bp, synthetic construct
  source 1..75: mol_type = other DNA
tcagcgcagaatggcgatacggccggactggtgaacactgccacgcagacatcgatggcaaaaatgcgtctgtcg

SEQ ID NO: 889137 - DNA, 75 bp, synthetic construct
  source 1..75: mol_type = other DNA
tcaggttgataatgtcccgaccggccttgcagccccggccagcctgatcactcgtattggtgccggaatggcaca

SEQ ID NO: 889138 - DNA, 75 bp, synthetic construct
  source 1..75: mol_type = other DNA
acggcacgcgtcgcgccatcacgccggaacattatgaaaaagtgatggagaacgcccgcgcacaggatgcggggc

SEQ ID NO: 889139 - DNA, 75 bp, synthetic construct
  source 1..75: mol_type = other DNA
ggcaggagtggttcttcgcatggtaccagttccgatttgacccatcagggtggaacaagcaaaggtttcagtgcg

SEQ ID NO: 889140 - DNA, 75 bp, synthetic construct
  source 1..75: mol_type = other DNA
ttctgttctccatcctgaaccatgcgatgaatttctacctgcagggcaaactcaacgggacggcggtgacgctgg

SEQ ID NO: 889141 - DNA, 75 bp, synthetic construct
  source 1..75: mol_type = other DNA
cgttttgctgggcatgacaatggcactgttcccggtgctgattgttctggccgtggtgagttccctgtcctggac

SEQ ID NO: 889142 - DNA, 75 bp, synthetic construct
  source 1..75: mol_type = other DNA
ttcgcttggtaagctcaacatgctgcactacttcccggaaaaactgttcagcggttacgacattcagcgttggaa

SEQ ID NO: 889143 - DNA, 75 bp, synthetic construct
  source 1..75: mol_type = other DNA
agcgctggcgatggtggcaatggacctgggacatggcgacgggcgcggtcgctgggtgaaacaggtgtatgcaca

SEQ ID NO: 889144 - DNA, 75 bp, synthetic construct
  source 1..75: mol_type = other DNA
aatgcgctggcggtggcagaagatcgtcacggcagactgatagataagccggatctgaaaagcgcgatgaaatac

SEQ ID NO: 889145 - DNA, 75 bp, synthetic construct
  source 1..75: mol_type = other DNA
acggatctgggccacggcgacggtcgcggccgctgggtgaaacaggtgtacggctaccgctggaaggaggaataa

SEQ ID NO: 889146 - DNA, 75 bp, synthetic construct
  source 1..75: mol_type = other DNA
tgcagtcaggaaagcggtggaaaacgccttaccgattgccagacagcgtaatggcagactgatcgacaagcctga

SEQ ID NO: 889147 - DNA, 75 bp, synthetic construct
  source 1..75: mol_type = other DNA
gccgatcgttcatccgaaagtcactacttttacccatctttcacagttaccggaactctggaaggctcgcggctg

SEQ ID NO: 889148 - DNA, 75 bp, synthetic construct
  source 1..75: mol_type = other DNA
ggcggcggttcacctggccaatgctgtaggcggtaacctgttcctcggctttatttcagcggttgctttcgccac

SEQ ID NO: 889149 - DNA, 75 bp, synthetic construct
  source 1..75: mol_type = other DNA
cattaacagcgcaaatgaaacgtgaagggatccgccgcttgctggtgttgagcggggaagagcgttggtgttttg

SEQ ID NO: 889150 - DNA, 75 bp, synthetic construct
  source 1..75: mol_type = other DNA
tggcgtttctggcaacgctgcggttttgtgctggtgcggatgggtaatcatcgtgaagccagcagcggttgctat

SEQ ID NO: 889151 - DNA, 75 bp, synthetic construct
  source 1..75: mol_type = other DNA
ttgatgccgctgcctttgcagcacttagcggaacgttgaaagcgggaagctggctggtgttgttactccctgtat

SEQ ID NO: 889152 - DNA, 75 bp, synthetic construct
  source 1..75: mol_type = other DNA
cacagaataccgaggcaatatcggggatactcagagcagcatacatggcgaagaaaatattgtaggaagacagta

SEQ ID NO: 889153 - DNA, 75 bp, synthetic construct
  source 1..75: mol_type = other DNA
gtgattgagtggcgggccaccggtgatgccaggaacggcatggcgtggatttacaacaccctgtgtgggccgggc

SEQ ID NO: 889154 - DNA, 75 bp, synthetic construct
  source 1..75: mol_type = other DNA
ccacagccggaacagcaacagatactacagcagcttctgaccatgccgcctggtgtggccgcggtaactgctgcg

SEQ ID NO: 889155 - DNA, 75 bp, synthetic construct
  source 1..75: mol_type = other DNA
tgagcacatttgaacaactgcaccagaatgaggatgaggtgtttgagcgaggggtgatcaacgtcttcagagggc

SEQ ID NO: 889156 - DNA, 75 bp, synthetic construct
  source 1..75: mol_type = other DNA
tgagctggaattacaaaaccaattgcccctgcaagtttggcagtaaaattatcgtcaacaacctggtaaggtggg

SEQ ID NO: 889157 - DNA, 75 bp, synthetic construct
  source 1..75: mol_type = other DNA
cggcgacattacgactagccgtcaatgcgggtgattttatcgccaaagcacaggaaatccttggctgcctcagcg

SEQ ID NO: 889158 - DNA, 75 bp, synthetic construct
  source 1..75: mol_type = other DNA
ccaaccggggataacgctcatttaaaaggggaagttattgacaaatattgggatgatctagaagaacatcttaca

SEQ ID NO: 889159 - DNA, 75 bp, synthetic construct
  source 1..75: mol_type = other DNA
ggtacgccgcatatcgcgggctataccctggaagggaaagcgcgtggtacaacgcaagtgtttgaagcttacagc

SEQ ID NO: 889160 - DNA, 75 bp, synthetic construct
  source 1..75: mol_type = other DNA
cgaaatctggcgtgacctgatgcaacgctccgggatgctttccttaatggatgcacaggcccatgatacatggta

SEQ ID NO: 889161 - DNA, 75 bp, synthetic construct
  source 1..75: mol_type = other DNA
catggcgaagaaaatattgtagacagacaatattcagagttaaaaaataatcacaaacaggaagaaattcagcaa

SEQ ID NO: 889162 - DNA, 75 bp, synthetic construct
  source 1..75: mol_type = other DNA
agatgagcgtaatggcctgattaatcactccccggtgtatggcaaatatgaagatgaggtggaccgcgagtccgc

SEQ ID NO: 889163 - DNA, 75 bp, synthetic construct
  source 1..75: mol_type = other DNA
aaagggaaagaggtagcggtggatgacggcattcttggtggattgaaggatattttgttcggcactaccggacca

SEQ ID NO: 889164 - DNA, 75 bp, synthetic construct
  source 1..75: mol_type = other DNA
tttggcgagaaaggccatccggtgcgggcgacggtttcggatctggggccgctgttgctggcgcggctgttgaat

SEQ ID NO: 889165 - DNA, 75 bp, synthetic construct
  source 1..75: mol_type = other DNA
ctgttctctatcagcgtggcattcctcggcatctggttcttctcggcaaccgataactcagcggaaggtgcgcgc

SEQ ID NO: 889166 - DNA, 75 bp, synthetic construct
  source 1..75: mol_type = other DNA
cagttaaaattggctcgcgagctattgctttcgttgagagtgaaattgacgagtggattaatcagcgtattgctg

SEQ ID NO: 889167 - DNA, 75 bp, synthetic construct
  source 1..75: mol_type = other DNA
gctgttgcttgcacggctgttaaatctcaacgacgtgcaatccggcgtgctgaatatcatcttccgtattgccga

SEQ ID NO: 889168 - DNA, 75 bp, synthetic construct
  source 1..75: mol_type = other DNA
tcgtgatgatataagcatggaggctgagagagacagtatcagaacaatgtttgcatatgaaatcgctaataacca

SEQ ID NO: 889169 - DNA, 75 bp, synthetic construct
  source 1..75: mol_type = other DNA
ggaaaaaaaaccgtcctgccggccgtcatcgtcactgtcacgggaaaaaaatgcgtgagccggaaaaagaaaatc

SEQ ID NO: 889170 - DNA, 75 bp, synthetic construct
  source 1..75: mol_type = other DNA
ctaaaattcttggtgttggtggaggattaggcgttagaggtggtggtcgggctggtattgattgggaagataatg

SEQ ID NO: 889171 - DNA, 75 bp, synthetic construct
  source 1..75: mol_type = other DNA
tgaacgaagcacactttgctaacaataataaagggagctttcgctccctttattcgttcattcggttacgatttt

SEQ ID NO: 889172 - DNA, 75 bp, synthetic construct
  source 1..75: mol_type = other DNA
caaaactggtgtttttcttcgacgaagcacatctgctgtttaacgatgcaccgcaggtactgctggataagattg

SEQ ID NO: 889173 - DNA, 75 bp, synthetic construct
  source 1..75: mol_type = other DNA
acgagatatattggctttgacgaaaattcggagcattttgttggcgagccttttgccattaatgtcaaatcatta

SEQ ID NO: 889174 - DNA, 75 bp, synthetic construct
  source 1..75: mol_type = other DNA
agtgggacaagtacgcagcacagctagtcgatgaagctccatcagaatggcacgactggaaaaatcgcattagtt

SEQ ID NO: 889175 - DNA, 75 bp, synthetic construct
  source 1..75: mol_type = other DNA
acgcattttgaatgtttcaccgcgccgtttactgaacttccttgaatctcgcggtatggcaccgattacagaatt

SEQ ID NO: 889176 - DNA, 75 bp, synthetic construct
  source 1..75: mol_type = other DNA
tcgacgcggtagattttccgcaagaacgcattttgaatgtttcaccgcgccgtttactgaacttccttgaatctc

SEQ ID NO: 889177 - DNA, 75 bp, synthetic construct
  source 1..75: mol_type = other DNA
atgtgtatccaccttaacttaatgatttttaccaaaatcattaggggattcatcagtgctccgcatcactggcac

SEQ ID NO: 889178 - DNA, 75 bp, synthetic construct
  source 1..75: mol_type = other DNA
tgttaaaacgactttatatcttgagaacggattcgctggagacgatgtcgcggctggtgagtaaccagccgcagg

SEQ ID NO: 889179 - DNA, 75 bp, synthetic construct
  source 1..75: mol_type = other DNA
gcgcattttgaatgtttctccgcgccgcttactgaacttccttgaatctcgcggtatggcaccgatggtgatgct

SEQ ID NO: 889180 - DNA, 75 bp, synthetic construct
  source 1..75: mol_type = other DNA
gatcctgcgcggcatcgaagctaacattaaaaatgttgatggtgaaattgactgcagcggtaaaatgtttgactc

SEQ ID NO: 889181 - DNA, 75 bp, synthetic construct
  source 1..75: mol_type = other DNA
atatgggggtcttactattctgcctatcctaattgggataaattattaaaaaagtacaatcaggggcagttatca

SEQ ID NO: 889182 - DNA, 75 bp, synthetic construct
  source 1..75: mol_type = other DNA
gctggatctgattattgccggttttcatgagccggtttttgcgccgcatgacaaagcgaccaatacgcaagcgat

SEQ ID NO: 889183 - DNA, 75 bp, synthetic construct
  source 1..75: mol_type = other DNA
gaagttcatgctcaacttcaaaaaggaaattttcaatgacctgatttgtgaaattgataatgatgaacaaaacat

SEQ ID NO: 889184 - DNA, 75 bp, synthetic construct
  source 1..75: mol_type = other DNA
gtggctgggtcgcgttaggatcggattctcacaccgcgtttaccatgggggactttgcagagtgtcgtaaaatcc

SEQ ID NO: 889185 - DNA, 75 bp, synthetic construct
  source 1..75: mol_type = other DNA
gcgcttaccgatccgtaggaagtaagccgaatacacggaaaacggaaacagaaatgtcaacgacggatgaaaagt

SEQ ID NO: 889186 - DNA, 75 bp, synthetic construct
  source 1..75: mol_type = other DNA
catacagcgaaataaaccggcattcatcagagaagtgcagctgctggcggaaaggcattttgaagaagaggatta

SEQ ID NO: 889187 - DNA, 75 bp, synthetic construct
  source 1..75: mol_type = other DNA
tcgtgatgtatttgatttccagtcacatactcattttttgcatcggatagatggctatcgccgccccatattact

SEQ ID NO: 889188 - DNA, 75 bp, synthetic construct
  source 1..75: mol_type = other DNA
tgacgaattaatgccgttagccaaagagatcgaccccaataataaccccagttatggcgtgctatgtggaatgtc

SEQ ID NO: 889189 - DNA, 75 bp, synthetic construct
  source 1..75: mol_type = other DNA
actggccgtcgcgttgcacaatatccctgaaggtctggcggttgcaggcccggtttatgcagcaacgggttctaa

SEQ ID NO: 889190 - DNA, 75 bp, synthetic construct
  source 1..75: mol_type = other DNA
cgccaatgaatgatccaggtgtcggtattatcgtcacaattgtcgcgttagtttgcaccatcgttcttgtctcgt

SEQ ID NO: 889191 - DNA, 75 bp, synthetic construct
  source 1..75: mol_type = other DNA
ggttggatatctctcgtgaactgacgaagcgttatccgcgcgaagatttaccgccgctggtggctttaactgcca

SEQ ID NO: 889192 - DNA, 75 bp, synthetic construct
  source 1..75: mol_type = other DNA
ttgaactgaacgtgattgtcgcgcgttctgtgctggaaaaattaggtaacagcgttgatgtcgccatgaccggca

SEQ ID NO: 889193 - DNA, 75 bp, synthetic construct
  source 1..75: mol_type = other DNA
aaccatggtgctgcatggtcaggtcgaaagcattgatgttattcgttctatcttctttggtttgctgattacgcc

SEQ ID NO: 889194 - DNA, 75 bp, synthetic construct
  source 1..75: mol_type = other DNA
ccgaaagacattgtcgatccggcaaccccttatccgggtgataaggtgattattaccgaaggcgcgttcgaaggc

SEQ ID NO: 889195 - DNA, 75 bp, synthetic construct
  source 1..75: mol_type = other DNA
taagatcaatctccctgcgcgagcggtggtgattacctttgatgatggcctcaagtcggtgagccgctatgcgta

SEQ ID NO: 889196 - DNA, 75 bp, synthetic construct
  source 1..75: mol_type = other DNA
catattttacgcgatgaagagaatactcgttttcgccatacgtcgaccacaacgtcggtacgtgcattcaataac

SEQ ID NO: 889197 - DNA, 75 bp, synthetic construct
  source 1..75: mol_type = other DNA
ccgctttattcagattcatttggaaatggaagactctctgcctttggttcaggcacatatggtggcggatcaggt

SEQ ID NO: 889198 - DNA, 75 bp, synthetic construct
  source 1..75: mol_type = other DNA
ccattctgctcactctcggcatcagtctgcataacttcccggaaggaattgccacctttgtaacggcaagcagca

SEQ ID NO: 889199 - DNA, 75 bp, synthetic construct
  source 1..75: mol_type = other DNA
agccacttcgtgcgctttggtgcatcgcctgcgatagtcccatcggctgtgattcatcagctgtcggtgtataaa

SEQ ID NO: 889200 - DNA, 75 bp, synthetic construct
  source 1..75: mol_type = other DNA
gcaaagtcagctttacacggctaaacaactggtgagcgaattgattggcatggacagcaaactgtccggcgtact

SEQ ID NO: 889201 - DNA, 75 bp, synthetic construct
  source 1..75: mol_type = other DNA
acaatctcaaaaattatgaaatattgggaagaatgatacctggagaaacgttactcctgattttgaatcatcctc

SEQ ID NO: 889202 - DNA, 75 bp, synthetic construct
  source 1..75: mol_type = other DNA
aacaatgtcagttctctaaagcaataattcttcttgttttaaccagaaaaagtattcttagtatatcactggaca

SEQ ID NO: 889203 - DNA, 75 bp, synthetic construct
  source 1..75: mol_type = other DNA
ttgatagtcaaaaactaataaaggaatttgattcaggacatgagtttatttacaatggtaaaatattcttaccat

SEQ ID NO: 889204 - DNA, 75 bp, synthetic construct
  source 1..75: mol_type = other DNA
ccggcgtgctgcgcaatcacggttacaacaaacgctacgtcgcggtggcgggcgatctcccgcaggggcaggcgc

SEQ ID NO: 889205 - DNA, 75 bp, synthetic construct
  source 1..75: mol_type = other DNA
gataatgggcaaattgaacccacgccattggctggtaatggatctgaagtggtatctgagcttggagaaaaactc

SEQ ID NO: 889206 - DNA, 75 bp, synthetic construct
  source 1..75: mol_type = other DNA
ataggttcaaaaaatacgcactttggcttatgactgggcaagtgtctccagataatgggcaaattgaacccacgc

SEQ ID NO: 889207 - DNA, 75 bp, synthetic construct
  source 1..75: mol_type = other DNA
gcgggtcctttccggcgatccagaacgttacggggcgtcaggcgcgcagtttttcgctatttgtgaaaattttcc

SEQ ID NO: 889208 - DNA, 75 bp, synthetic construct
  source 1..75: mol_type = other DNA
tggcgcaacttgatagccgtgagtgccgccagttgctcaaccaggcaatggcctgccgtacttcgctggaagtgg

SEQ ID NO: 889209 - DNA, 75 bp, synthetic construct
  source 1..75: mol_type = other DNA
aatgacctgacgcaatatctactggcagtggatcgcgataacgctaaggtgactcgtcactacaacagcctgaat

SEQ ID NO: 889210 - DNA, 75 bp, synthetic construct
  source 1..75: mol_type = other DNA
cacttcaacctgtttgtcgcccgtatcgccaccgccagtttcatggcctacgcgctggggcaaatcctcgacgtg

SEQ ID NO: 889211 - DNA, 75 bp, synthetic construct
  source 1..75: mol_type = other DNA
tccagtaactatctggttcagcttccggtctccatttttggttttcataccacctggggcgcgtttagctttccg

SEQ ID NO: 889212 - DNA, 75 bp, synthetic construct
  source 1..75: mol_type = other DNA
cccgtatcgctaccgccagcttcatggcctacgcgctgggacagatcctcgacgtgcacgtctttaaccgcctgc

SEQ ID NO: 889213 - DNA, 75 bp, synthetic construct
  source 1..75: mol_type = other DNA
ggtgttcagcgccgggctgctggcgtttgacgatgatttcagcaccaatatcagcgtctggctgagctggtattt

SEQ ID NO: 889214 - DNA, 75 bp, synthetic construct
  source 1..75: mol_type = other DNA
cacgttggggtcatgggcgtggccgcttgctgtttacctggatagtcctgctcggtgcgaccgttgcggctctgt

SEQ ID NO: 889215 - DNA, 75 bp, synthetic construct
  source 1..75: mol_type = other DNA
tattacttccgcacagggattctcatgaccctgccggtactgtttgtaacgctggtggcgctggtgctacgcctc

SEQ ID NO: 889216 - DNA, 75 bp, synthetic construct
  source 1..75: mol_type = other DNA
gaagaatatgactatcagctggggatattacttccgtacagggattatcatgaccctgccggtgctgtttgtgac

SEQ ID NO: 889217 - DNA, 75 bp, synthetic construct
  source 1..75: mol_type = other DNA
atggaaaccccggcgctgattttcgatgaagtggatgtgggtattagcggtccgacagcggccgtcgtcggcaaa

SEQ ID NO: 889218 - DNA, 75 bp, synthetic construct
  source 1..75: mol_type = other DNA
atgttggcacaactgaccatcagcaactttgctatcgttcgtgagcttgagattgattttcacagcggcatgacc

SEQ ID NO: 889219 - DNA, 75 bp, synthetic construct
  source 1..75: mol_type = other DNA
cgcggtgcgccctggcagattgtcatcttctcgctcggtatgtatctggtggtttatggcctgcgcaatgcgggg

SEQ ID NO: 889220 - DNA, 75 bp, synthetic construct
  source 1..75: mol_type = other DNA
ctgttgattgatggacaatggcgcgatcacgtactgacggcattaaccaccccagactggacgcccggccgctaa

SEQ ID NO: 889221 - DNA, 75 bp, synthetic construct
  source 1..75: mol_type = other DNA
atgatcgaaaaaatctggtctggtgaatcccctttatggcggctattgctgccactctcctggttgtatggcctg

SEQ ID NO: 889222 - DNA, 75 bp, synthetic construct
  source 1..75: mol_type = other DNA
gtaaaatggttgagctggagaaaaaaccttctggtgactggtttgctgacctgacccgcctcggcgtagacctgg

SEQ ID NO: 889223 - DNA, 75 bp, synthetic construct
  source 1..75: mol_type = other DNA
tcgccgcgattgttgccacgctggtgatgctgcatctctatttccgcaaagatattccgcagaactacgacatgg

SEQ ID NO: 889224 - DNA, 75 bp, synthetic construct
  source 1..75: mol_type = other DNA
atcgggttaattaataaaaatacattgccgattattataaattggctggatgaaaataacattccttacgatgaa

SEQ ID NO: 889225 - DNA, 75 bp, synthetic construct
  source 1..75: mol_type = other DNA
tgggttttgaaaaagaaggttatgcgaaagactatctgttgattgatggacaatggcgcgatcacgtactgacgg

SEQ ID NO: 889226 - DNA, 75 bp, synthetic construct
  source 1..75: mol_type = other DNA
ggttgatgcatagcgatcgtgtgggttacgaaacgctcggtcgtctctggcaatggttaaaagttccgtcaggca

SEQ ID NO: 889227 - DNA, 75 bp, synthetic construct
  source 1..75: mol_type = other DNA
cgacagcactggcgagcgtactttctattactggcgtaacgaagcggccgcaaaattctggctggagagcgagca

SEQ ID NO: 889228 - DNA, 75 bp, synthetic construct
  source 1..75: mol_type = other DNA
gtaactgcgctgggaacggacagttttagccaacagatgctggatacctggcacgctgaaaacatcgatacttcc

SEQ ID NO: 889229 - DNA, 75 bp, synthetic construct
  source 1..75: mol_type = other DNA
cctttgtcacggcgagcagcaacctggagctgggatttggcatcgcactggccgtcgcgttgcacaatattcctg

SEQ ID NO: 889230 - DNA, 75 bp, synthetic construct
  source 1..75: mol_type = other DNA
atcccgttacttctttgattatccccgggcgcgtgccgatctggagaccatccgtgatggcatcgatcgctatct

SEQ ID NO: 889231 - DNA, 75 bp, synthetic construct
  source 1..75: mol_type = other DNA
gcgcttgaccgtgccagaacggcatcccttcaggccacgcctcatgacgggcgttatttcttcgactacccgcgc

SEQ ID NO: 889232 - DNA, 75 bp, synthetic construct
  source 1..75: mol_type = other DNA
ttatactattgttccgattactcagacattccgactggaggctgatttgacattagaacagattggtccggaggt

SEQ ID NO: 889233 - DNA, 75 bp, synthetic construct
  source 1..75: mol_type = other DNA
gatcacggccatgacactggtggccaaccacagcgccctcaatgctcggatcatcggttccaacgagcacgaatc

SEQ ID NO: 889234 - DNA, 75 bp, synthetic construct
  source 1..75: mol_type = other DNA
tattccagtcggtgaatgcaattgcggtgatgctcgctggggttgttctggcctggctggcgtcgccagaaagcc

SEQ ID NO: 889235 - DNA, 75 bp, synthetic construct
  source 1..75: mol_type = other DNA
cgatagcactggcgaacgcactttctactactggcgtaacgaagccgcagctaaattctggctggagagcgagca

SEQ ID NO: 889236 - DNA, 75 bp, synthetic construct
  source 1..75: mol_type = other DNA
gcgaatttcgattatctctacctgagcgggattagcctggcgatcttaagcccgaccagccgcgagaaactgctt

SEQ ID NO: 889237 - DNA, 75 bp, synthetic construct
  source 1..75: mol_type = other DNA
gcgaatgcatgattgagctttccgagaaaggcgcggacgttaagcgcggtttcggcggcgataccctgaacactt

SEQ ID NO: 889238 - DNA, 75 bp, synthetic construct
  source 1..75: mol_type = other DNA
cctgaaggtctggcagtagcggggccggtttatgctgcaacaggctcgaaacgcaccgcaattctgtgggccggg

SEQ ID NO: 889239 - DNA, 75 bp, synthetic construct
  source 1..75: mol_type = other DNA
ctgaagttggctattaatatgcagaatatcaacttcgacaaccttccacctgctgataaccggcagaaaaaaagc

SEQ ID NO: 889240 - DNA, 75 bp, synthetic construct
  source 1..75: mol_type = other DNA
accagcgtggtaaaaggtgttaaaaacaaacaggacgaatttgtctttacagaatttaacccggcacaaacccaa

SEQ ID NO: 889241 - DNA, 75 bp, synthetic construct
  source 1..75: mol_type = other DNA
gtatcaaatatgggtttctacgcaacatgggggggagaaaaacccaccgacatcaacgcattagcaaaatggcag

SEQ ID NO: 889242 - DNA, 75 bp, synthetic construct
  source 1..75: mol_type = other DNA
cagtttatcgattcagtgcgaacagattgcaaatgtattcttcttgaacaccatatgcctttgctgagaattttc

SEQ ID NO: 889243 - DNA, 75 bp, synthetic construct
  source 1..75: mol_type = other DNA
ggctgccggacgtggtgttgtatcgccggagaatatcgcgttcacccgctggctgacacacctgcaggacggtgt

SEQ ID NO: 889244 - DNA, 75 bp, synthetic construct
  source 1..75: mol_type = other DNA
tgcgacacgccgtggtgtcagccggaaagcgacgttattgcagaattaagccgccgtttcagttgcacactggag

SEQ ID NO: 889245 - DNA, 75 bp, synthetic construct
  source 1..75: mol_type = other DNA
atggtggcctttatttttggcataaacaatattggggtaaaaatgaaagttttaatggtttatgaaaatgttcca

SEQ ID NO: 889246 - DNA, 75 bp, synthetic construct
  source 1..75: mol_type = other DNA
tgatgaattaatgccattggctaaagaaattgatcccaataataaccccagctatggcgttctatgtggaatgtc

SEQ ID NO: 889247 - DNA, 75 bp, synthetic construct
  source 1..75: mol_type = other DNA
gccacctttgtgacggcaagcagcaacctggagctgggctttggcatcgctctggccgtcgcattacacaatatt

SEQ ID NO: 889248 - DNA, 75 bp, synthetic construct
  source 1..75: mol_type = other DNA
ggtctggattcatggacagagttaccggggatcaaagaaccgggtgccatctttgaaggcccggcctactcccgc

SEQ ID NO: 889249 - DNA, 75 bp, synthetic construct
  source 1..75: mol_type = other DNA
taaaggggaggcgccggataaagccggctggcaatgtgtgcctttttcactatctgaactgagctgtcacggtga

SEQ ID NO: 889250 - DNA, 75 bp, synthetic construct
  source 1..75: mol_type = other DNA
ttcaatattgaagtacctactgcactattccagtcggtgaacgcaattgcggtgatgctcgctggggttgttctg

SEQ ID NO: 889251 - DNA, 75 bp, synthetic construct
  source 1..75: mol_type = other DNA
tatcaatgtgctgaccggcgggatgtcgattgtgggtccgcgtccgcacgcagtggcgcataacgaacagtatcg

SEQ ID NO: 889252 - DNA, 75 bp, synthetic construct
  source 1..75: mol_type = other DNA
aacgaaacaattatttccggcggcaccgcgcatgagggcggggcagtccacgttattgacacagtgagagtgaat

SEQ ID NO: 889253 - DNA, 75 bp, synthetic construct
  source 1..75: mol_type = other DNA
ctgcaggtgccactgcgtgacttgtgggatccggcaacctgtccggtcagtttcctgccttatctcgcctgggcg

SEQ ID NO: 889254 - DNA, 75 bp, synthetic construct
  source 1..75: mol_type = other DNA
taacaagcgcatggtcgccgtagcgggggatttagccgccggacaaatgctgatggagagcttccgtaatcagcc

SEQ ID NO: 889255 - DNA, 75 bp, synthetic construct
  source 1..75: mol_type = other DNA
acgcagaacgatccgcgcgtcaccaaagtggggaactttctgcgccgcacctcgctggatgaactgccgcagttt

SEQ ID NO: 889256 - DNA, 75 bp, synthetic construct
  source 1..75: mol_type = other DNA
cggtggcgcataacgaacagtatcgacagctcattgaaggctacatgctgcgccataaggtgaaaccgggcatta

SEQ ID NO: 889257 - DNA, 75 bp, synthetic construct
  source 1..75: mol_type = other DNA
atggcgaattaccgtcttatatcactggcgctgacagcgccctgtggaaaaaatacggcagtggcgataacggta

SEQ ID NO: 889258 - DNA, 75 bp, synthetic construct
  source 1..75: mol_type = other DNA
aaccggcaaggatatcgctgggctgaaaactgagcttgagcagaaaaaaattaagtttgattaccaggaatatcc

SEQ ID NO: 889259 - DNA, 75 bp, synthetic construct
  source 1..75: mol_type = other DNA
tgggtcagcaaattcagtctcctgaccttcctgcctgggaagataacgtcggtgaatggattgaagagatgaaag

SEQ ID NO: 889260 - DNA, 75 bp, synthetic construct
  source 1..75: mol_type = other DNA
atacaccgacacaaagggaccatcagcgcactgcgccgggccattgagccgctgggatacctcattcgtgtgtct

SEQ ID NO: 889261 - DNA, 75 bp, synthetic construct
  source 1..75: mol_type = other DNA
cagccagcaccttcatgcggaatgcggagaaaccgacggcgcggatcagcggtattcctgtcgaccttcgaaagc

SEQ ID NO: 889262 - DNA, 75 bp, synthetic construct
  source 1..75: mol_type = other DNA
gcgttatcggttgatcgctgggataaaggctggtcagaacagacaaagcgacaggtgattaaatccgcctggctg

SEQ ID NO: 889263 - DNA, 75 bp, synthetic construct
  source 1..75: mol_type = other DNA
aagtttcgctctatgaaagtgatggaaaatgacaacgtcgtgacccaggcgacacaaaacgatccgcgtgtgacc

SEQ ID NO: 889264 - DNA, 75 bp, synthetic construct
  source 1..75: mol_type = other DNA
gattttgctgatgataatttcagctatactagtttatactgttaccaaagtatttgatgtgatgaatggtcatga

SEQ ID NO: 889265 - DNA, 75 bp, synthetic construct
  source 1..75: mol_type = other DNA
tctttcagggaaaagaatcaatggcgttatcctccatagtaaatgttacaacaagattgtcgacaattccattaa

SEQ ID NO: 889266 - DNA, 75 bp, synthetic construct
  source 1..75: mol_type = other DNA
atcgacccaaatagcacaaccgttgaggcaaacaaaactgttcagctgaccgcaaatgtcgagccggcaggagca

SEQ ID NO: 889267 - DNA, 75 bp, synthetic construct
  source 1..75: mol_type = other DNA
tcttaagcgggcatcgtcatttccagtccacgcgtagtatggataaaaaagcgctcactagcgtcaaatttgcct

SEQ ID NO: 889268 - DNA, 75 bp, synthetic construct
  source 1..75: mol_type = other DNA
ttaatattgtggatgattcacttcctttggatgaaaggttagagctttcagttaatatggtttatctggaaggtg

SEQ ID NO: 889269 - DNA, 75 bp, synthetic construct
  source 1..75: mol_type = other DNA
atttgagttactaagatttcataaagataacttatcagaaattaaaacaacgtattcagatggaaaagtgtatgt

SEQ ID NO: 889270 - DNA, 75 bp, synthetic construct
  source 1..75: mol_type = other DNA
gtggccaaaaattgaggcatttattacctggctaagagagcaggtatgtcagtcttgtcagtacctgagataccg

SEQ ID NO: 889271 - DNA, 75 bp, synthetic construct
  source 1..75: mol_type = other DNA
gtggccaaaaattgaggcatttattacctggctaagagagcaggtatgtcagtcttgtcagtatccgggataccg

SEQ ID NO: 889272 - DNA, 75 bp, synthetic construct
  source 1..75: mol_type = other DNA
gtggccaaaaattgaggcatttattacctggctaagagagcaggtatgtcagtcttgtcagtaactgcgataccg

SEQ ID NO: 889273 - DNA, 75 bp, synthetic construct
  source 1..75: mol_type = other DNA
acctgcgtcactgtacgttgctccatgacagacaggcatggagcaacgactccggtacggatgaatggcatagtt

SEQ ID NO: 889274 - DNA, 75 bp, synthetic construct
  source 1..75: mol_type = other DNA
tcaccgtgctcactggtaatgacaatgtcaatctgcaacgtgccggaatcgatttggcaatctattttgatgacg

SEQ ID NO: 889275 - DNA, 75 bp, synthetic construct
  source 1..75: mol_type = other DNA
gtggccaaaaattgaggcatttattacctggctaagagagcaggtatgtcagtcttgtcagtagccgtgataccg

SEQ ID NO: 889276 - DNA, 75 bp, synthetic construct
  source 1..75: mol_type = other DNA
agcaaaccatagctaatagcgaacactttccaatatacgcttttagttctatctgccctgaactagaaaataccg

SEQ ID NO: 889277 - DNA, 75 bp, synthetic construct
  source 1..75: mol_type = other DNA
caacgcaaaacattaagctgatggccgtcgtgcatcgcctgcaacaaattatgattaacgagaatctgacccctg

SEQ ID NO: 889278 - DNA, 75 bp, synthetic construct
  source 1..75: mol_type = other DNA
tgccgaaatagtcagggataattacggcaagctggatagcatcagcaggccgacacaatacgcccccccaccacg

SEQ ID NO: 889279 - DNA, 75 bp, synthetic construct
  source 1..75: mol_type = other DNA
gaaccacggctgcgctttacgctaacagaagtgaatgatctaccggtccggcaaacgccgatgtttacgctgctg

SEQ ID NO: 889280 - DNA, 75 bp, synthetic construct
  source 1..75: mol_type = other DNA
gggtgaagatgacggcctggtggcactgcatctacaggaatatgctgcagaatcgttcactcccgccgaagcgga

SEQ ID NO: 889281 - DNA, 75 bp, synthetic construct
  source 1..75: mol_type = other DNA
atggaaggtaaaaatggcctgaaaatagtgtgcgatagcggtgcgggggggggggcgacggagcaagctgttttc

SEQ ID NO: 889282 - DNA, 75 bp, synthetic construct
  source 1..75: mol_type = other DNA
ttggaaatagagttctcaccgccgacagtggttagcttttgtagtttaggcggctacagcgacaacacgtcaatc

SEQ ID NO: 889283 - DNA, 75 bp, synthetic construct
  source 1..75: mol_type = other DNA
tgtagtcacgttaatcgtgttctccgcaatcagtctggtttgcggtttcatttattcaaaattcattgtctttag

SEQ ID NO: 889284 - DNA, 75 bp, synthetic construct
  source 1..75: mol_type = other DNA
ctgctgatagatgcgcacttcccccgatggtcacccttatcactttctccgccatcagcctggtgtgcggtttcg

SEQ ID NO: 889285 - DNA, 75 bp, synthetic construct
  source 1..75: mol_type = other DNA
actgatggccatcgttcatcgtctgcagcagataatggtcaatgagaatttgacacccacagagctggtcgggtg

SEQ ID NO: 889286 - DNA, 75 bp, synthetic construct
  source 1..75: mol_type = other DNA
gtcggtgagtcgttatgcatatcccattctgaaaggatacggtatgaaggcgacggcatttattattacctcgcg

SEQ ID NO: 889287 - DNA, 75 bp, synthetic construct
  source 1..75: mol_type = other DNA
gtatttctgaactacgtgatgtcagcgatgtttttgatttccagtcacatacccattttttacatcgggttgatg

SEQ ID NO: 889288 - DNA, 75 bp, synthetic construct
  source 1..75: mol_type = other DNA
ggcgcgctttgaggtgaaccgccacaccctgcgccgcgccatcgaccaactggtggaaaaaggctgggtacagcg

SEQ ID NO: 889289 - DNA, 75 bp, synthetic construct
  source 1..75: mol_type = other DNA
gctccaggcattgctggaaaatgaagagtcccgcgagcagttgctcaaagaaatcggccaggtgagcaataaaca

SEQ ID NO: 889290 - DNA, 75 bp, synthetic construct
  source 1..75: mol_type = other DNA
tcgctccccgcgagcgaattaatatatcttacgttccaaaaacagatggtcagactgctgaggtggaacttccac

SEQ ID NO: 889291 - DNA, 75 bp, synthetic construct
  source 1..75: mol_type = other DNA
gatggctgaagcagccattggcctcaattttactgtccccgccacgctgaagggaagcacaacagacgatgaact

SEQ ID NO: 889292 - DNA, 75 bp, synthetic construct
  source 1..75: mol_type = other DNA
atttggatgacgaaagttgtcaaattacttttgatgttactgttagttttaatgtcactgccagcggacctgata

SEQ ID NO: 889293 - DNA, 75 bp, synthetic construct
  source 1..75: mol_type = other DNA
tgaaacagacattcaagaaaaggcattaagcgcatttaatggtttcatggaggactcaaacacaactattgtaga

SEQ ID NO: 889294 - DNA, 75 bp, synthetic construct
  source 1..75: mol_type = other DNA
taccctgaatgttctgctgcgttataccgtggtgggatactgcaaaatggcatctgaatcgatcgcagtttggca

SEQ ID NO: 889295 - DNA, 75 bp, synthetic construct
  source 1..75: mol_type = other DNA
ggggagaacgtcatccacctgcgcaccctgcgccgggtcaacggcatcgcgctctgtttaatcgaccactacttt

SEQ ID NO: 889296 - DNA, 75 bp, synthetic construct
  source 1..75: mol_type = other DNA
ggcgagaacgttatccacctgcgcaccctgcgccgggtcaacggcgtcgcgctctgtttaatcgaccactacttc

SEQ ID NO: 889297 - DNA, 75 bp, synthetic construct
  source 1..75: mol_type = other DNA
ccgtcagggcgtcggcgtactggtgctgatgcgcccgttcgattacccgctcaacgcccaggcgcgttttagcca

SEQ ID NO: 889298 - DNA, 75 bp, synthetic construct
  source 1..75: mol_type = other DNA
ggtgaatctgttgccaaacaaagcactatgcagcgtagcgcaaccggtacctcttctcgttcaatgggtggctga

SEQ ID NO: 889299 - DNA, 75 bp, synthetic construct
  source 1..75: mol_type = other DNA
gaagccgacatggtgcgtaccggcgctgctcgtgccgacctgtgcgcccgtttttctctgaaagatacgccagcg

SEQ ID NO: 889300 - DNA, 75 bp, synthetic construct
  source 1..75: mol_type = other DNA
accgatggaaagagtcagtattaccgagcgcccggactggcgcgaaaaagcccacgaatacggtttcaattttca

SEQ ID NO: 889301 - DNA, 75 bp, synthetic construct
  source 1..75: mol_type = other DNA
ggccagttttcgttgaccacttcactgttgatgctaaactctcactttttcagaatttactgatttttctaatgt

SEQ ID NO: 889302 - DNA, 75 bp, synthetic construct
  source 1..75: mol_type = other DNA
ttctcatttgtctggggatgatctgctacagtattttctccaaagtgtggttgctggcgctggtctggagacgcg

SEQ ID NO: 889303 - DNA, 75 bp, synthetic construct
  source 1..75: mol_type = other DNA
ctggcattgttcactaccgcatttattattatctctcagttaaatcatggcgtgaataaactctacaacacatta

SEQ ID NO: 889304 - DNA, 75 bp, synthetic construct
  source 1..75: mol_type = other DNA
cgcaactttgccagctacggtcatctgatgggcgaaatgccgcgtgaagtgcgcgatctgctgtgcgatccgcaa

SEQ ID NO: 889305 - DNA, 75 bp, synthetic construct
  source 1..75: mol_type = other DNA
ttgacgaagagcttcgctgacattaaaaatctcaatccacaaaaggttggtttgggagaagcggcaaaacggaat

SEQ ID NO: 889306 - DNA, 75 bp, synthetic construct
  source 1..75: mol_type = other DNA
atgccactagtgagcagaatggtcattatcaaaaacgttggtttgggagaagcggcgaaaaggaatgtggggact

SEQ ID NO: 889307 - DNA, 75 bp, synthetic construct
  source 1..75: mol_type = other DNA
agcattcgcttctggttcgggatggttcaggctaccaggtggatatattgttcagtttggcactttttcaggaaa

SEQ ID NO: 889308 - DNA, 75 bp, synthetic construct
  source 1..75: mol_type = other DNA
ctgcaatttttgatatggatggattacttatcgactcagaacctttatgggatcgagccgaactggatgtgatgg

SEQ ID NO: 889309 - DNA, 75 bp, synthetic construct
  source 1..75: mol_type = other DNA
aaaatatcttttttgaattatgttgtacggtcaagaactttgatgtgcgctaaaatttgcaaacatattaatgaa

SEQ ID NO: 889310 - DNA, 75 bp, synthetic construct
  source 1..75: mol_type = other DNA
agagggtaagggaaaagctcctgtccagcagccagttaacaatggtaagagcaaaaatgaagaaggcggcgatgc

SEQ ID NO: 889311 - DNA, 75 bp, synthetic construct
  source 1..75: mol_type = other DNA
gtggaggcatccggtgccagcctggagaaggagaggcacgaccagctgcttaccgcgcttcgtgcgctgctgtta

SEQ ID NO: 889312 - DNA, 75 bp, synthetic construct
  source 1..75: mol_type = other DNA
cgcagaaggataagttcggcgcgggtaagaacggttttacccgtggcaacccccagaccggcacgcctgccaccg

SEQ ID NO: 889313 - DNA, 75 bp, synthetic construct
  source 1..75: mol_type = other DNA
tgcgccagaagcgcaaaatgatccacgttttgtattagcaaacgtcaaactctcatcgctgacagaactcaccgc

SEQ ID NO: 889314 - DNA, 75 bp, synthetic construct
  source 1..75: mol_type = other DNA
gcgattcactgtggcgtatacgacacccaatctcggcgaaataccgacagtgcattttgaatcaatagggtacta

SEQ ID NO: 889315 - DNA, 75 bp, synthetic construct
  source 1..75: mol_type = other DNA
tggtttcagtcagtgttatgtctgatgccgttcagtcagacccgtcgattcctgccccgcaggttttgtctgtaa

SEQ ID NO: 889316 - DNA, 75 bp, synthetic construct
  source 1..75: mol_type = other DNA
cgcagaaggataagttcggcgcgggtaagaacggttttaccagtggtaacccccagactggcacgcctgccaccg

SEQ ID NO: 889317 - DNA, 75 bp, synthetic construct
  source 1..75: mol_type = other DNA
gcgctgtcaggtaagcagccactggatgagacgctgactcatttgagtggaaaggatgttgccggtcttctcgca

SEQ ID NO: 889318 - DNA, 75 bp, synthetic construct
  source 1..75: mol_type = other DNA
ctgttaagccgcaagaatccgtttggtgatatcaaatcggatggcacggtgaaaacggctctcgaaaaccttggt

SEQ ID NO: 889319 - DNA, 75 bp, synthetic construct
  source 1..75: mol_type = other DNA
cgcaaaccttgatttgggagaggcggcaaaacgggatgtagggacaggggaaaatcagataccggacatgaacgc

SEQ ID NO: 889320 - DNA, 75 bp, synthetic construct
  source 1..75: mol_type = other DNA
gaaaatcagataccggacatggcctcgtttgccagtggtgatggatggatgaaattacccaacgggaaaatcctg

SEQ ID NO: 889321 - DNA, 75 bp, synthetic construct
  source 1..75: mol_type = other DNA
cgtgcgctgctgttaagccgcaagaatccgtttggcgatatcaaatcggatggcacggtgaaaacggctctcgaa

SEQ ID NO: 889322 - DNA, 75 bp, synthetic construct
  source 1..75: mol_type = other DNA
gcgacaaatgtccataacactggatttgatattacagtgtcgcccggttcaggatatggttcatctgctgatgcg

SEQ ID NO: 889323 - DNA, 75 bp, synthetic construct
  source 1..75: mol_type = other DNA
ggggaaaatcagataccggacatggcttcatttagtggggtgagggattattacggaaaacaacttttgccagga

SEQ ID NO: 889324 - DNA, 75 bp, synthetic construct
  source 1..75: mol_type = other DNA
ctttgtatttcctaataaggtgctgggcgttatccctctggtatcaacaacagcttatggtggtgtatccagtaa

SEQ ID NO: 889325 - DNA, 75 bp, synthetic construct
  source 1..75: mol_type = other DNA
tccggcatgcctctttgccagtggtatgatggtgaattcaacgggaaatcctgcaatatggtcgtgtgcggttac

SEQ ID NO: 889326 - DNA, 75 bp, synthetic construct
  source 1..75: mol_type = other DNA
tctttgccagtggtaatggatggatgaaattaccaacgggaaaatcctgcaatatggtcgtggtgcggttacgcc

SEQ ID NO: 889327 - DNA, 75 bp, synthetic construct
  source 1..75: mol_type = other DNA
cagctgctgtgcgaagtggcgtcttcgggcaaacgagacatcgatctggcgctggatgctgcgcacaaagtgaaa

SEQ ID NO: 889328 - DNA, 75 bp, synthetic construct
  source 1..75: mol_type = other DNA
accgcctggacggaacgcgaagcgcgtaaccgttgcccgtccggttttgtcgctgtattcgctgcccgtatccgt

SEQ ID NO: 889329 - DNA, 75 bp, synthetic construct
  source 1..75: mol_type = other DNA
tggtgaatatcgtttccgcagatttctttggcctcggctttcgcgaatacgcatcggtgatggtgccggtggata

SEQ ID NO: 889330 - DNA, 75 bp, synthetic construct
  source 1..75: mol_type = other DNA
gtcagaacgtcaaatcatccacgtaaccgcctggacggaacgcgaagcgcgtaaccgttgcccgtccggttgtgt

SEQ ID NO: 889331 - DNA, 75 bp, synthetic construct
  source 1..75: mol_type = other DNA
ctcgtacattctcaaaccgcctttatctggcgctttatcacctttggcacgtcagaacgtcaaatcatccacgta

SEQ ID NO: 889332 - DNA, 75 bp, synthetic construct
  source 1..75: mol_type = other DNA
ctcgtacattctcaaactgcctttatctggcgctttatcatctttggcgcgtcagaatcccaaatcatccacgta

SEQ ID NO: 889333 - DNA, 75 bp, synthetic construct
  source 1..75: mol_type = other DNA
gcaccacactggcattcgtgatggctgccgggtttatttccgatactgctagcttgccgcttatcgtatcgaacc

SEQ ID NO: 889334 - DNA, 75 bp, synthetic construct
  source 1..75: mol_type = other DNA
tgtttgctgtggcgaaacgaggccatgtcattaacactggtaaagtgctgcgtggggcaccatggcagatagtca

SEQ ID NO: 889335 - DNA, 75 bp, synthetic construct
  source 1..75: mol_type = other DNA
gaaaaattatctattgcaatattttttacttttatgctgattatgataaaaggtccaataatttatagcgattat

SEQ ID NO: 889336 - DNA, 75 bp, synthetic construct
  source 1..75: mol_type = other DNA
actgctatcattcttatcccgcacatgcagcttttggtggttataaaaaatcaggtatagggcgtgaaacacata

SEQ ID NO: 889337 - DNA, 75 bp, synthetic construct
  source 1..75: mol_type = other DNA
tcacggtaatttgctgtttaccaactggctcaactattacgtctatcagatcacgccatacgatctacggcacat

SEQ ID NO: 889338 - DNA, 75 bp, synthetic construct
  source 1..75: mol_type = other DNA
ttgggcggttcaggccgcgcttaatattctctacggtatacccaagcaaacccgcaccgacaaactttcgggtgt

SEQ ID NO: 889339 - DNA, 75 bp, synthetic construct
  source 1..75: mol_type = other DNA
cccccggttcctgctgcgccacccttactcaccggatgaaaaccctgtcaaaaccttccgttaccatgaagatgt

SEQ ID NO: 889340 - DNA, 75 bp, synthetic construct
  source 1..75: mol_type = other DNA
ctgaagggaacttccggacaatgccggtgcagaccgtcaccgcgaccactccgtccggcagcagacctgcggtga

SEQ ID NO: 889341 - DNA, 75 bp, synthetic construct
  source 1..75: mol_type = other DNA
ctctgctggggaccttattactttccggctgcgcaggaacaaatacggaatttgagtgtaacgccaccacatccg

SEQ ID NO: 889342 - DNA, 75 bp, synthetic construct
  source 1..75: mol_type = other DNA
cccgcagcaggcctgctgtgacagcacttccggagcagaaactgctggcaccacgcccgctgtttactgcagccc

SEQ ID NO: 889343 - DNA, 75 bp, synthetic construct
  source 1..75: mol_type = other DNA
agacggctgcattatggatagcgccttatattgataatcaggatgtttatcatcagccatccagcgtgttttttg

SEQ ID NO: 889344 - DNA, 75 bp, synthetic construct
  source 1..75: mol_type = other DNA
cggctgcgccggaacgaactttgattttgagtgtgatgccaccacgtcagatacctgcatgacaatggaacaggc

SEQ ID NO: 889345 - DNA, 75 bp, synthetic construct
  source 1..75: mol_type = other DNA
ttatattgataaccaggatgtttatcatcagccatccagcgtgtttttgttattaaaccgtctgcgtggggaaaa

SEQ ID NO: 889346 - DNA, 75 bp, synthetic construct
  source 1..75: mol_type = other DNA
ggcagcaaagagcgcgatgaagaaaacgacggcacgccattgcctgtggtggcgaaaggcgatgagttgctgtgt

SEQ ID NO: 889347 - DNA, 75 bp, synthetic construct
  source 1..75: mol_type = other DNA
caaaaaagggcgctatatccactccaccgacgccggaaaagcgttattccattcgctgccggagatggcaacgag

SEQ ID NO: 889348 - DNA, 75 bp, synthetic construct
  source 1..75: mol_type = other DNA
atgacccgtgcgtataccattctcggtcgcaatgccggttatcagggcgtactttccgtgggacgcgtgcagaca

SEQ ID NO: 889349 - DNA, 75 bp, synthetic construct
  source 1..75: mol_type = other DNA
tgtcgcacccggtggggagtctgctaaaaaagcaccgaataagcgtgtaaagaaagcggcaaagcctaaaaaaaa

SEQ ID NO: 889350 - DNA, 75 bp, synthetic construct
  source 1..75: mol_type = other DNA
gagcgaagcgtgtgaaccttatcaggatgaagaagggcgcttgttacatcgtccgctggcggagcatgtggtcaa

SEQ ID NO: 889351 - DNA, 75 bp, synthetic construct
  source 1..75: mol_type = other DNA
cagtttcgcggcattgtggctccgggcagtggtggcagtgctgataagaaaaaggctgcaccgcgtaaacgtagt

SEQ ID NO: 889352 - DNA, 75 bp, synthetic construct
  source 1..75: mol_type = other DNA
caataatacttattttattaactgtttttttccctggaattgtgctttggggaggaaattttaaaatagagttga

SEQ ID NO: 889353 - DNA, 75 bp, synthetic construct
  source 1..75: mol_type = other DNA
gggcagcttcgctcggttatggttaccctgagctgttcagcattcccggtgaatcgaaacgcgaaatcttccata

SEQ ID NO: 889354 - DNA, 75 bp, synthetic construct
  source 1..75: mol_type = other DNA
cagcattcccggtgaatcaaaacgtgaaatcttccatagcctgatgctgcagaagctgccggatatgctcatcct

SEQ ID NO: 889355 - DNA, 75 bp, synthetic construct
  source 1..75: mol_type = other DNA
gcctgatgctgcagaagttgccggatatgctcatcctgatgctgctgttcgttccctcgaccagtcggcggttct

SEQ ID NO: 889356 - DNA, 75 bp, synthetic construct
  source 1..75: mol_type = other DNA
aacaaaagcattaaatattgccgacattaaaatcaaatcagaggcattcatcaatcatgaattccgaaataatcc

SEQ ID NO: 889357 - DNA, 75 bp, synthetic construct
  source 1..75: mol_type = other DNA
gtactggtggtggatatcgatcaaccgctggaaggtgttgtggcaagcaccattgaggttattaaaaaaggcaaa

SEQ ID NO: 889358 - DNA, 75 bp, synthetic construct
  source 1..75: mol_type = other DNA
ttaagaaaacatcttcatcacatgcccgtctgaatgtacccgcgatggtacaggtggcggcgcttgccattatta

SEQ ID NO: 889359 - DNA, 75 bp, synthetic construct
  source 1..75: mol_type = other DNA
ataaactccggggggtgtgttatatagactctccgcgcgcagctacccctgcagacgttgtgaatcgccggcaaa

SEQ ID NO: 889360 - DNA, 75 bp, synthetic construct
  source 1..75: mol_type = other DNA
gcacctcggaacagacgttgtagagtcgataaacgcgtatctgcataaattagaggagcagggcgcgattaacgg

SEQ ID NO: 889361 - DNA, 75 bp, synthetic construct
  source 1..75: mol_type = other DNA
gaatcattgagatcagcagttggcatgatatcgttgagcgcccgcattttcgctcaaacatcaaccctacaaacg

SEQ ID NO: 889362 - DNA, 75 bp, synthetic construct
  source 1..75: mol_type = other DNA
gggcggcttcgctggggtatggttatccggagctgttcagcattcccggtgaatcaaaacgtgaaatcttccata

SEQ ID NO: 889363 - DNA, 75 bp, synthetic construct
  source 1..75: mol_type = other DNA
ttttattattggtgagacaaactgcacagcgaacctactgaacgccagccaggtcagcaccattattcgctacga

SEQ ID NO: 889364 - DNA, 75 bp, synthetic construct
  source 1..75: mol_type = other DNA
cccttgtcagataatgtggtgacatttctcccggtttattcagggagttacggaaataaatttgcagttgaaatt

SEQ ID NO: 889365 - DNA, 75 bp, synthetic construct
  source 1..75: mol_type = other DNA
agaagcaaagaggaacgactgcaacaagttgaacttgtttttgaagccattggcagtggcttacgctaccaagaa

SEQ ID NO: 889366 - DNA, 75 bp, synthetic construct
  source 1..75: mol_type = other DNA
tatcagggaaagtagcaatctccggccaggatgcggatctcgcaggtattaaacgtattgctgccggtacgcaaa

SEQ ID NO: 889367 - DNA, 75 bp, synthetic construct
  source 1..75: mol_type = other DNA
gtaaaaataggaatggcgattgatgatctccgtcttgaacgctggcaaaaagatcgggatatctttgttaaaaaa

SEQ ID NO: 889368 - DNA, 75 bp, synthetic construct
  source 1..75: mol_type = other DNA
tggctgcgatctggggccgaaaatcacccctattggtagcctggcgacactgctctggctgcacgtgctttcaca

SEQ ID NO: 889369 - DNA, 75 bp, synthetic construct
  source 1..75: mol_type = other DNA
tattacttccgggtgggcattgtcatgacaatccccgtgctgtttgtcacgcttgcagcactggcgcttcgtctg

SEQ ID NO: 889370 - DNA, 75 bp, synthetic construct
  source 1..75: mol_type = other DNA
ggccacgctgatcatgctgcatctcttcttccgcagggatattccggcaacgtatgacgtttcgctgctgaagac

SEQ ID NO: 889371 - DNA, 75 bp, synthetic construct
  source 1..75: mol_type = other DNA
caaggtaattacttcctgatgggcggctcgccggtagataacaacgccaagctgttccgcgccggacaaatgaaa

SEQ ID NO: 889372 - DNA, 75 bp, synthetic construct
  source 1..75: mol_type = other DNA
cgccctaaaggcgatggtgtggtgcgtattcagcgtcagaccagtggacgtaaaggtaagggcgtttgcctgatt

SEQ ID NO: 889373 - DNA, 75 bp, synthetic construct
  source 1..75: mol_type = other DNA
tccagggagataagcgtgatttattaaaatcactccttgaagcgaaaggaatgaaagtaaaactcgcgggcgggt

SEQ ID NO: 889374 - DNA, 75 bp, synthetic construct
  source 1..75: mol_type = other DNA
ccaaatattcgctaatgcaaaactggtgtctcaatgatacatggaaacggcgttggggtatcatctggaactgta

SEQ ID NO: 889375 - DNA, 75 bp, synthetic construct
  source 1..75: mol_type = other DNA
cctgctgtttacttatatcgttctgctcggtgctgcggtagcagcgctatttgccaatgatggtgcagctctcat

SEQ ID NO: 889376 - DNA, 75 bp, synthetic construct
  source 1..75: mol_type = other DNA
agtctgccgcttatcgtgtccaacctggttaacatcgtttctgcagacttctttgggctgggcttcactgagtat

SEQ ID NO: 889377 - DNA, 75 bp, synthetic construct
  source 1..75: mol_type = other DNA
ctgttgttactgatcccggtgattgaggctgaagaagcccgtacagaagaggatattgccccatggctgagataa

SEQ ID NO: 889378 - DNA, 75 bp, synthetic construct
  source 1..75: mol_type = other DNA
tgagcttaaggcgaagaagtgcgcgaaagagagcattcctcaggcacttaaaagcaagggcattaagaacttact

SEQ ID NO: 889379 - DNA, 75 bp, synthetic construct
  source 1..75: mol_type = other DNA
cgagattgattgtaatgaggaggcggtgctggagattattctgcaggaactgaaccgccggtcaccctcaccctg

SEQ ID NO: 889380 - DNA, 75 bp, synthetic construct
  source 1..75: mol_type = other DNA
cgttgtacaactttctcggatcgcacaatccatactggcggttgacggaaagcagcgatgttttgcgcttttcta

SEQ ID NO: 889381 - DNA, 75 bp, synthetic construct
  source 1..75: mol_type = other DNA
aggtgtcacgctgctttctttctataaaatcgatgcgagcatgaccacaaaaattctctatgccggggtaaccta

SEQ ID NO: 889382 - DNA, 75 bp, synthetic construct
  source 1..75: mol_type = other DNA
gcaaaaggctttgttcaactcagtagcgccactaacaacgattctgaaacgcaggctgcaacgccgaaagcagta

SEQ ID NO: 889383 - DNA, 75 bp, synthetic construct
  source 1..75: mol_type = other DNA
acagcatccacgaaggcgacagaggcagctggcagtgcgacggcggcagcacagagcaaaagtacggcggaatcc

SEQ ID NO: 889384 - DNA, 75 bp, synthetic construct
  source 1..75: mol_type = other DNA
cgagatcgatcataatgaagaggcggttctgggggagattctgcaggaactgagccgccggtcaccctcacccca

SEQ ID NO: 889385 - DNA, 75 bp, synthetic construct
  source 1..75: mol_type = other DNA
ggtgaaagcgggttttatagcaacctgccgttccggcaaggatacgcctataatgtcgcattaacaaacgggatg

SEQ ID NO: 889386 - DNA, 75 bp, synthetic construct
  source 1..75: mol_type = other DNA
ttttggtatctacgattcaggaacatggggttattcgatgcagagaatagcggatggattccgctttcgatcgcg

SEQ ID NO: 889387 - DNA, 75 bp, synthetic construct
  source 1..75: mol_type = other DNA
gtacgctgaatgattttctcggtgccatgacggaggatgatgcccgtccggaggcgctgcgccgttttgaactga

SEQ ID NO: 889388 - DNA, 75 bp, synthetic construct
  source 1..75: mol_type = other DNA
tttggctacagtggcttcattctggaacatagatatcagtattgcacataaagcaatttatgcgggaataacgta

SEQ ID NO: 889389 - DNA, 75 bp, synthetic construct
  source 1..75: mol_type = other DNA
cctggtgagtgacccgctggggttgcaggggggtgagcagacttaccggtatgtacataaccccaatgaatctat

SEQ ID NO: 889390 - DNA, 75 bp, synthetic construct
  source 1..75: mol_type = other DNA
ggtgcaaatgcaggaattggttccatggtagatagttcagttgatcctgaaaatgcaatcattgcaggatgggtc

SEQ ID NO: 889391 - DNA, 75 bp, synthetic construct
  source 1..75: mol_type = other DNA
atgggaagcattaaaagcattaccgcaaaaatgatcagtacgattctgaatgatgattttaatgtaggtatgttg

SEQ ID NO: 889392 - DNA, 75 bp, synthetic construct
  source 1..75: mol_type = other DNA
aactggaaaacgtcattgagcgcgcggtattgctaacacgcggcaacgtgctgcagctgtcattgccagatattg

SEQ ID NO: 889393 - DNA, 75 bp, synthetic construct
  source 1..75: mol_type = other DNA
attcccgattcacctgccgccactacgcgagcgtccggaagatattccgctgctggcgaaagcctttaccttcaa

SEQ ID NO: 889394 - DNA, 75 bp, synthetic construct
  source 1..75: mol_type = other DNA
cttgtggcggtctactacgctcaaggtgagtcttatacgagtcttggtttcttgtttaatacctgtttatttttg

SEQ ID NO: 889395 - DNA, 75 bp, synthetic construct
  source 1..75: mol_type = other DNA
gtgattggcttcttggatcgtacaaacatggccggattttcgttccgtgaatcacagcttgaaccgattcgtgaa

SEQ ID NO: 889396 - DNA, 75 bp, synthetic construct
  source 1..75: mol_type = other DNA
atggccaatgattatgacctgatggcgggagtttgtgcaggatccccggtgattctgcacaaacaaatgattaag

SEQ ID NO: 889397 - DNA, 75 bp, synthetic construct
  source 1..75: mol_type = other DNA
atgtggtgtttggtgagcgcaaactgaaaaccaccgtgctggctaacgatggtgagctgatcgtgcttggaggtc

SEQ ID NO: 889398 - DNA, 75 bp, synthetic construct
  source 1..75: mol_type = other DNA
ctactaccagcgaaacgccgcgggttgtttataattcgagaacggataagccgtggccggtggcgctttatttga

SEQ ID NO: 889399 - DNA, 75 bp, synthetic construct
  source 1..75: mol_type = other DNA
gaaaatcatatcagtcgagacatacttatgcctgctggtcgctgacagctggtgctaacccggcatttatagcaa

SEQ ID NO: 889400 - DNA, 75 bp, synthetic construct
  source 1..75: mol_type = other DNA
gaagatataaaagagtatatatctaccattcattccgaaagaattaaagaagcacagaagctcttagaatcggca

SEQ ID NO: 889401 - DNA, 75 bp, synthetic construct
  source 1..75: mol_type = other DNA
cgcccggtatgtagcgacgacgacggtatgctgattgacgcagtgctgcgccattacctgaaaaatatcgacgag

SEQ ID NO: 889402 - DNA, 75 bp, synthetic construct
  source 1..75: mol_type = other DNA
ctcggggcaacgctgcgtagcggtgaacacactgaaattaacgacgtgatccatgtacggggtgacgatggaaca

SEQ ID NO: 889403 - DNA, 75 bp, synthetic construct
  source 1..75: mol_type = other DNA
gccgtgcttattttgcgacagaccaacaactataacagcgatgatttccagtttgtgtggaatatttacgccaat

SEQ ID NO: 889404 - DNA, 75 bp, synthetic construct
  source 1..75: mol_type = other DNA
tgataggcattcagtcggagaaactcagtcgttattgtcacgaacggtgcaatagtgatccacacccaacgcctg

SEQ ID NO: 889405 - DNA, 75 bp, synthetic construct
  source 1..75: mol_type = other DNA
gttcgatttgccggtggcgcgaacggacggcgaaggtcaccgctggcagtaccgctatgataaggacacgctgca

SEQ ID NO: 889406 - DNA, 75 bp, synthetic construct
  source 1..75: mol_type = other DNA
gtggcaggatacggaatcagggctgtgctataaccggttccggtactacgagccggaaaccggaatgtacctggt

SEQ ID NO: 889407 - DNA, 75 bp, synthetic construct
  source 1..75: mol_type = other DNA
cgtctgggcatagagtacgaccaccacaaccggccggaaacactcaccgacgtgatgggccgcgaacaccacacc

SEQ ID NO: 889408 - DNA, 75 bp, synthetic construct
  source 1..75: mol_type = other DNA
cgtggacgcagcagtgtgatgaacgcggcctgccggtaagtctggtgtcgccacagggcgaagagacccggctgg

SEQ ID NO: 889409 - DNA, 75 bp, synthetic construct
  source 1..75: mol_type = other DNA
ccatgtatgaatgggatgaattccatcacctgctggcccgccactcccctgccgggcgggtggagaagtttgaat

SEQ ID NO: 889410 - DNA, 75 bp, synthetic construct
  source 1..75: mol_type = other DNA
ctggcctggacggacggtaacggtgttgtctggacaatggaatacggcccgtttgatttgccggtggcgcgaacg

SEQ ID NO: 889411 - DNA, 75 bp, synthetic construct
  source 1..75: mol_type = other DNA
aggaatttacgaagatgtacagggcgcactggaagcgatggggttaaatctcgaagagctgattgatgaagaaaa

SEQ ID NO: 889412 - DNA, 75 bp, synthetic construct
  source 1..75: mol_type = other DNA
agggggaaccctcatggggtgatattgccactgacctgcttgaatcggcagcggaaaaagcagtaccactggcga

SEQ ID NO: 889413 - DNA, 75 bp, synthetic construct
  source 1..75: mol_type = other DNA
agccagccagcttgtcacccagcgcgccggatttttcccggaggaaaccacatggggcgggctgctcccctcact

SEQ ID NO: 889414 - DNA, 75 bp, synthetic construct
  source 1..75: mol_type = other DNA
gaagaagccacatggggcgggctggttccgtcactggtacgggagtaccgttacgacagcgcgggtaacgtgtca

SEQ ID NO: 889415 - DNA, 75 bp, synthetic construct
  source 1..75: mol_type = other DNA
aaaactcggcgcattgctgagcagaacaaaaaatgccctgaaaaatacgtataacgtcctgaaaaagtttatcaa

SEQ ID NO: 889416 - DNA, 75 bp, synthetic construct
  source 1..75: mol_type = other DNA
tttctttgacggcgacatgctcaccatttacccgccgacaccgtcggtatctgtcgatgcggggattgtcatggg

SEQ ID NO: 889417 - DNA, 75 bp, synthetic construct
  source 1..75: mol_type = other DNA
gaagaagccacatggggcgggctggttccgtcactggcgcgggaataccgttatgacagcgcgggcaatgtgtcg

SEQ ID NO: 889418 - DNA, 75 bp, synthetic construct
  source 1..75: mol_type = other DNA
tgaggggttacgtgatgatggcttagctcttccctttgggcaaaccttacgtattggagtgatttcctcactggc

SEQ ID NO: 889419 - DNA, 75 bp, synthetic construct
  source 1..75: mol_type = other DNA
ttaatgatgcatatgaagatttgcccgtaataggggtaatcgacagtggagtgaataaccatccattcctagatg

SEQ ID NO: 889420 - DNA, 75 bp, synthetic construct
  source 1..75: mol_type = other DNA
cgatgataaaactttagtattattttcttctaacgattcactggccgatttaaaagatagaattaatgcctactc

SEQ ID NO: 889421 - DNA, 75 bp, synthetic construct
  source 1..75: mol_type = other DNA
gatgttcaccaccagctctaaggaagatgccacttttggcctcggctggcgcgtgaatggtaatgccaccatgac

SEQ ID NO: 889422 - DNA, 75 bp, synthetic construct
  source 1..75: mol_type = other DNA
agtagcggagcaggaaggacatctgatggaaatggaagccacgcaagcaccttaaaatcaccatcatacactaaa

SEQ ID NO: 889423 - DNA, 75 bp, synthetic construct
  source 1..75: mol_type = other DNA
ctgtgcacatgtacttcttttttcttataaaaaagctagatcattgatccaaaaaagaaaaaatgaaaaagaaga

SEQ ID NO: 889424 - DNA, 75 bp, synthetic construct
  source 1..75: mol_type = other DNA
atgttgcggaatctacccgcctggggccgctttctggcgaggttcgggctggggagatcctgcacctggtggggc

SEQ ID NO: 889425 - DNA, 75 bp, synthetic construct
  source 1..75: mol_type = other DNA
tacgccagctctgagcgaagccgcagagcaatatctgaatacagttgcgacacgcagaacccgtgatacggcatt

SEQ ID NO: 889426 - DNA, 75 bp, synthetic construct
  source 1..75: mol_type = other DNA
cgctgggatatttcagcgatatggaaaggatatgtgggatatcaacaagataattgcagttaaatctttattgtt

SEQ ID NO: 889427 - DNA, 75 bp, synthetic construct
  source 1..75: mol_type = other DNA
atggagggtaataaagatagccgtattaataaaaatgtcgtcgttctggctggaaatcatgaaatcaattttaat

SEQ ID NO: 889428 - DNA, 75 bp, synthetic construct
  source 1..75: mol_type = other DNA
tgtatgcaggacagtggcaggatgcggaatccgggctgtgctataaccggttccggtattacgagccggaaaccg

SEQ ID NO: 889429 - DNA, 75 bp, synthetic construct
  source 1..75: mol_type = other DNA
ggtggccattaagttctggcagcccatcaaagcctttattcgcggctttattgatggttttaccggcgcactgga

SEQ ID NO: 889430 - DNA, 75 bp, synthetic construct
  source 1..75: mol_type = other DNA
aactgataccaccattaataacgatggtcgtcagattattgccgctggtggcctcgctaccagcacagtgattaa

SEQ ID NO: 889431 - DNA, 75 bp, synthetic construct
  source 1..75: mol_type = other DNA
caacacaggcctggagttcggtgctgataatgatgacaacagcggtggtcagtgggtacagacggggggcgtggc

SEQ ID NO: 889432 - DNA, 75 bp, synthetic construct
  source 1..75: mol_type = other DNA
gtgctgaccggacacacagccactaatacccgtgtggatgatggcggaacgctggatgtccgcaacggtggtgcc

SEQ ID NO: 889433 - DNA, 75 bp, synthetic construct
  source 1..75: mol_type = other DNA
cgcagctcgcttggctctatcggtggcggcaatcatttcgctgaactgcaacaagttgatcaaatcatcaacgct

SEQ ID NO: 889434 - DNA, 75 bp, synthetic construct
  source 1..75: mol_type = other DNA
tcttgatgtctcgtaccatgaagtctgctgatagcgtcatttttatttctaattatgctagaaataaaattaaag

SEQ ID NO: 889435 - DNA, 75 bp, synthetic construct
  source 1..75: mol_type = other DNA
gatgagctggtgagctggctgaaaggtcacaagattgaccatgcgcatatctgcatcgaagcgaccggcacctat

SEQ ID NO: 889436 - DNA, 75 bp, synthetic construct
  source 1..75: mol_type = other DNA
gttaacgcaggagagattcactttgataatcagacgacacaggaagccgcgctgagccgtgctgttgcaaaaagt

SEQ ID NO: 889437 - DNA, 75 bp, synthetic construct
  source 1..75: mol_type = other DNA
ttcgcttatttgaatctcaattgttccctgtctgcgccagtgacgaacacggagaagcactttttaacctcgcgc

SEQ ID NO: 889438 - DNA, 75 bp, synthetic construct
  source 1..75: mol_type = other DNA
tcctgaccttacctactgacgggcagggcggaagcttcatggcgttcttcgcggtcttcctggcgctgttcctga

SEQ ID NO: 889439 - DNA, 75 bp, synthetic construct
  source 1..75: mol_type = other DNA
cagcgtccgtctcagcattcagggcggtcatctcggtcacgataacaatggcggtattgcccgtggggccacgcc

SEQ ID NO: 889440 - DNA, 75 bp, synthetic construct
  source 1..75: mol_type = other DNA
cggtctggcgcgtgccagacgtatgggcgtcgccaccacccatgaaggggtgatcgggctgatgaacatgcctga

SEQ ID NO: 889441 - DNA, 75 bp, synthetic construct
  source 1..75: mol_type = other DNA
tatgacctccagcgcgctggcgaccgctgagaagatggcgcagtccctcgctcgtcaggcaggagaagcagcatg

SEQ ID NO: 889442 - DNA, 75 bp, synthetic construct
  source 1..75: mol_type = other DNA
caatgtctggtgctggctgggttaattattcctgtcgcgcgactgcgcccggtgctgacgctcaaaaacagtgga

SEQ ID NO: 889443 - DNA, 75 bp, synthetic construct
  source 1..75: mol_type = other DNA
taatgatggcaaatctctgcccttccacctttttggataaaaatataaatatcgctgctgagcttgatattaaaa

SEQ ID NO: 889444 - DNA, 75 bp, synthetic construct
  source 1..75: mol_type = other DNA
gtagtcagggactggtgttcagtatcccgcagtcttatttactcagtaaaaccgaccccagtcaatgggattatg

SEQ ID NO: 889445 - DNA, 75 bp, synthetic construct
  source 1..75: mol_type = other DNA
cagcgcaggattgagcagcaggggaagtgatgatgtcggagctggggtttcctatgcatttgatgccactaacac

SEQ ID NO: 889446 - DNA, 75 bp, synthetic construct
  source 1..75: mol_type = other DNA
cgttatattactaccggtagtgtcgacgagaaaaactccaccagcgataaagtctcttttacattttctggtgcc

SEQ ID NO: 889447 - DNA, 75 bp, synthetic construct
  source 1..75: mol_type = other DNA
atcgaacaaacaggtggcaaatcctttaaagttatacagtttgatgcaggtgaaaaaaatacaaaaaaaatagta

SEQ ID NO: 889448 - DNA, 75 bp, synthetic construct
  source 1..75: mol_type = other DNA
attgaaataattgaacaagatacaaagaatagtcaaaacacacttgaacaaatggttgaactggtttactttaat

SEQ ID NO: 889449 - DNA, 75 bp, synthetic construct
  source 1..75: mol_type = other DNA
gggggatttattactggggaaatcgcaaactcagacagagttattttctgactttaatttttatggcgtatcagt

SEQ ID NO: 889450 - DNA, 75 bp, synthetic construct
  source 1..75: mol_type = other DNA
cggctcaacgaccctgagttctgccaccattctgcataacagataccgggctggcgggataaccctgactcagtc

SEQ ID NO: 889451 - DNA, 75 bp, synthetic construct
  source 1..75: mol_type = other DNA
gcaaagagctttacagataggacagaccttcagttactaacttaccgttaccagagtaagggatatgttgagttt

SEQ ID NO: 889452 - DNA, 75 bp, synthetic construct
  source 1..75: mol_type = other DNA
tcaacagccatcagtcaggtgcagggcgatttattactgggtaaatctcagacacgcactgaactgttttctgat

SEQ ID NO: 889453 - DNA, 75 bp, synthetic construct
  source 1..75: mol_type = other DNA
ctcaggcgtatttactgagtaaaacagaccctgcgcgctgggattatggcgtgaatggcgggcgtctgaaatatt

SEQ ID NO: 889454 - DNA, 75 bp, synthetic construct
  source 1..75: mol_type = other DNA
atatttcggggatcgcttcaggcccgtcacgggtaaccgtgacccagaacggttatacgatttattcccgcatgg

SEQ ID NO: 889455 - DNA, 75 bp, synthetic construct
  source 1..75: mol_type = other DNA
agggcatcgccttctcgcagaaaatctggagatacagcttaacagaggccatacttttttgcaggcattccgttt

SEQ ID NO: 889456 - DNA, 75 bp, synthetic construct
  source 1..75: mol_type = other DNA
cttcgtcggcggcgtcacgtgtgtttagaccccgtcatcgggtcccgttcacgccgccatacccgttttgccacc

SEQ ID NO: 889457 - DNA, 75 bp, synthetic construct
  source 1..75: mol_type = other DNA
ttgcggaggacaatcattgtactgctttatattgttttttgatgtgtcggctgtcccgcagctctgctctttcct

SEQ ID NO: 889458 - DNA, 75 bp, synthetic construct
  source 1..75: mol_type = other DNA
cagccggtgctgactgtcgtaatggtaccggtgggtgcgctcatcatccgtgcggataaccccttccgggatgag

SEQ ID NO: 889459 - DNA, 75 bp, synthetic construct
  source 1..75: mol_type = other DNA
gcgaattgctttgctggaaaatctgcgcagtttctttctgagtgttatctggttacccctgaatgtttcgccatt

SEQ ID NO: 889460 - DNA, 75 bp, synthetic construct
  source 1..75: mol_type = other DNA
gcgggatggggctggcacaaggctacctgaacgacgcagagaaaacggcggcgagctttgtctggcgcgaagcga

SEQ ID NO: 889461 - DNA, 75 bp, synthetic construct
  source 1..75: mol_type = other DNA
atattgtgtccgcgtgtagtgcaccagccggtgctgactgtcgtaatggtaccggtgggtgcgctcatcatccgt

SEQ ID NO: 889462 - DNA, 75 bp, synthetic construct
  source 1..75: mol_type = other DNA
accagttggtttcggattgggttttcgccatcgataaaagggtatcctgatagagagggagagcctgtcggtgat

SEQ ID NO: 889463 - DNA, 75 bp, synthetic construct
  source 1..75: mol_type = other DNA
cagcagcaggctgcactggcagctaagcgttctgaaaaagatcgagagttgcaacagtgggtggcgaaacagagc

SEQ ID NO: 889464 - DNA, 75 bp, synthetic construct
  source 1..75: mol_type = other DNA
gtaaccatatcccgatcaacggatacctgattggcacgaatgattacgaaggacatcacgtttttgatatctggt

SEQ ID NO: 889465 - DNA, 75 bp, synthetic construct
  source 1..75: mol_type = other DNA
atttgcgaagttacgggcctgagtatgtcccggctcatgcggtatctggcgttaagtcctgcagaccgtgaggcc

SEQ ID NO: 889466 - DNA, 75 bp, synthetic construct
  source 1..75: mol_type = other DNA
gtatcagattatgcgtgcactggaggacaagggctggaacaggataaaaattgcccgttatctcgggctgaatcg

SEQ ID NO: 889467 - DNA, 75 bp, synthetic construct
  source 1..75: mol_type = other DNA
agataccactggtactcaagaaaaaataactaaagacaaagatattgtgttcacaaatgggggaaatgttctgtt

SEQ ID NO: 889468 - DNA, 75 bp, synthetic construct
  source 1..75: mol_type = other DNA
ttgacaaataaacccaggcgccgaaaagacgggcgttacgtcaggatctatcaatgggatgtaccggaaattggt

SEQ ID NO: 889469 - DNA, 75 bp, synthetic construct
  source 1..75: mol_type = other DNA
gtatagaagaattattggatgtgtttgagaattttgagtccggaataccccccgaagatccagacctttatgttt

SEQ ID NO: 889470 - DNA, 75 bp, synthetic construct
  source 1..75: mol_type = other DNA
agtatttcggcgggtataattttggcacaggtaatgtctggctggactttaaaaatatgaagtttgattttagtt

SEQ ID NO: 889471 - DNA, 75 bp, synthetic construct
  source 1..75: mol_type = other DNA
aaagatacgaattatttgattccatattgcaaaataaaagcggggaaataagtgcggctttaagtagttttgaat

SEQ ID NO: 889472 - DNA, 75 bp, synthetic construct
  source 1..75: mol_type = other DNA
tggttctgccacaacagtaacaggaacaaaatttgggggggcgttactttcgggtggggcggcgacttttgatgc

SEQ ID NO: 889473 - DNA, 75 bp, synthetic construct
  source 1..75: mol_type = other DNA
tctaatattcttattgattccttagatgatgcaaaagttaatctcgaaaaggtcatcgattcgatattgaagact

SEQ ID NO: 889474 - DNA, 75 bp, synthetic construct
  source 1..75: mol_type = other DNA
tgctattgcattatgtcctaattgccatagacaagcccattatggcgatctgacattactacctgttaataaata

SEQ ID NO: 889475 - DNA, 75 bp, synthetic construct
  source 1..75: mol_type = other DNA
tcagctatgagcagctgacccgggaagcagaagatgcgattaaaaaatgcaatctgaaccaggacgggatgagtt

SEQ ID NO: 889476 - DNA, 75 bp, synthetic construct
  source 1..75: mol_type = other DNA
tcacaaagtaaattcagatgccaggtatgtggatatacagcgaacgccgatgtaaatggcgctcgtaacatttta

SEQ ID NO: 889477 - DNA, 75 bp, synthetic construct
  source 1..75: mol_type = other DNA
gcccccgtaaccggtgtcaaaaaaacagaaacacgtcatattgagcagggaatgcccctgcgtacagggctggaa

SEQ ID NO: 889478 - DNA, 75 bp, synthetic construct
  source 1..75: mol_type = other DNA
ggaaaacctgccgcccgcaaagaatgataacgaactgctgaaaaatttgccgaagtgcaaggtcgcggcagcctg

SEQ ID NO: 889479 - DNA, 75 bp, synthetic construct
  source 1..75: mol_type = other DNA
atgccgcaaaaaacgatcatagtcagcattttatgcataactattttggtgattgtctggatgatacacaactca

SEQ ID NO: 889480 - DNA, 75 bp, synthetic construct
  source 1..75: mol_type = other DNA
gggccggtttagttaatccagtcgcgcggttgcgtccggtactgacgctcaaaaacagtggagggaaaaaaggat

SEQ ID NO: 889481 - DNA, 75 bp, synthetic construct
  source 1..75: mol_type = other DNA
ttaatcgttctcaagcttatctagatttcgttgacataccactagatactgacataccagtttttctagaccctg

SEQ ID NO: 889482 - DNA, 75 bp, synthetic construct
  source 1..75: mol_type = other DNA
atggcaaaaagaaaaaacaacgttgttaagaagatcggtgattcagcttctcttctaagtaaacctaaatctatt

SEQ ID NO: 889483 - DNA, 75 bp, synthetic construct
  source 1..75: mol_type = other DNA
caaccgggaggtgcgacaaaaatgttgttctcacatgcacagaaaacgctggcctgggatgccttcgcatttact

SEQ ID NO: 889484 - DNA, 75 bp, synthetic construct
  source 1..75: mol_type = other DNA
atgctatccgactaagcaaaaacaaatacatgatggtagaaaacggattgatattacttataataatgaggctaa

SEQ ID NO: 889485 - DNA, 75 bp, synthetic construct
  source 1..75: mol_type = other DNA
atgttatccaacgaaacagaaaaaaattcatgatggtagaaagaggattgatattacttataataatgaagccaa

SEQ ID NO: 889486 - DNA, 75 bp, synthetic construct
  source 1..75: mol_type = other DNA
agtgacaaaattgacatatatccaattctcaataaattaaaatcattaaagccgggtacaaaacaagctggggag

SEQ ID NO: 889487 - DNA, 75 bp, synthetic construct
  source 1..75: mol_type = other DNA
agactaattggagatagcgatgcagccaaatcatttgtaattcttgttgcttcgcaagaacatgcccctagcatc

SEQ ID NO: 889488 - DNA, 75 bp, synthetic construct
  source 1..75: mol_type = other DNA
cgaaacgttgaaatgaaatataaaatgtacattcaaaaacttaataaaaaaaacatagagctcactcctgaaaat

SEQ ID NO: 889489 - DNA, 75 bp, synthetic construct
  source 1..75: mol_type = other DNA
tcaagaaggcaacgcctttgtcattatgggagctggagaacaattaaaacgtattaaatatgaagttggtgaaaa

SEQ ID NO: 889490 - DNA, 75 bp, synthetic construct
  source 1..75: mol_type = other DNA
ttgttataataaccatagtctcaatcatactttataaattagttgaggagcctttagagctgatgctaagaaaac

SEQ ID NO: 889491 - DNA, 75 bp, synthetic construct
  source 1..75: mol_type = other DNA
cattcacggctagaagggtagctgaaagaaacttaaagctcgcatcaactttgctttctctctatcatcataagc

SEQ ID NO: 889492 - DNA, 75 bp, synthetic construct
  source 1..75: mol_type = other DNA
ttcttccaaagagaacgagagatcagttcaaatgaagagattattacattcctagagaacatcccctcagagaca

SEQ ID NO: 889493 - DNA, 75 bp, synthetic construct
  source 1..75: mol_type = other DNA
ggtgctggatgaacccacgcagggcgtggacgtaaacggtcaggtcgcgttatatgatcttatagaccagttgcg

SEQ ID NO: 889494 - DNA, 75 bp, synthetic construct
  source 1..75: mol_type = other DNA
cgtattctggatagccagagcggcgaagtgactttaggtactccggtagtaattacattcaacaatactaacagc

SEQ ID NO: 889495 - DNA, 75 bp, synthetic construct
  source 1..75: mol_type = other DNA
cgagcgcgcggtattgctaacacgcggcaacgtgctgcagctgtcattgccagatattgctttaccagaacctga

SEQ ID NO: 889496 - DNA, 75 bp, synthetic construct
  source 1..75: mol_type = other DNA
ctacctcgggcagcctggcacgggcgaaagtcggtgaacaaatcaccatgacggtgcgcacagttaatgctctga

SEQ ID NO: 889497 - DNA, 75 bp, synthetic construct
  source 1..75: mol_type = other DNA
gaccagttatttatccgcattctgaaagcggaagataagctggaactgtgggcaagcaccaacaacaagccttac

SEQ ID NO: 889498 - DNA, 75 bp, synthetic construct
  source 1..75: mol_type = other DNA
agcccggctatgattacttcgaaaaaaatcgccgattgccaatcatttctgttgaaaaccggcgttataaaatta

SEQ ID NO: 889499 - DNA, 75 bp, synthetic construct
  source 1..75: mol_type = other DNA
tggaaaacaccaaagaaactgaaatcggtggtgccacaggcgttggcgtacgtattctggatagccagagcggcg

SEQ ID NO: 889500 - DNA, 75 bp, synthetic construct
  source 1..75: mol_type = other DNA
gtagccagggcgctttggttgcaaccaccagggcgacgcgggtcacaggaacacgcgcggatggcgtcgcgttca

SEQ ID NO: 889501 - DNA, 75 bp, synthetic construct
  source 1..75: mol_type = other DNA
attctgcctgcactgaaacgcgttcaggccgggcatctgattgacgcgccaatgcaaaagctctctggtggtgaa

SEQ ID NO: 889502 - DNA, 75 bp, synthetic construct
  source 1..75: mol_type = other DNA
atgtctgcttttaaaaagtcacttcttgttgctggcgtagcaatgattctttccaataacgtatttgctgatgaa

SEQ ID NO: 889503 - DNA, 75 bp, synthetic construct
  source 1..75: mol_type = other DNA
ctggcagtttatataaacgaccgctgctggcggctgaaaccacgcatgaagtaggcacagtacgggaaaataacg

SEQ ID NO: 889504 - DNA, 75 bp, synthetic construct
  source 1..75: mol_type = other DNA
tatcaaacgaaaagatgctgaaaaccgccagggagtggtgaataacacctcacctgtcaatcttgataccactga

SEQ ID NO: 889505 - DNA, 75 bp, synthetic construct
  source 1..75: mol_type = other DNA
tgaaaccgggatgcgatttaccgatggtaactggaacctgacgccgtatgcatcgttaacgggggttcaccgctg

SEQ ID NO: 889506 - DNA, 75 bp, synthetic construct
  source 1..75: mol_type = other DNA
caagcaggtctgggaagatcttctcattaaactaaagctggagaacaaagaaaatgcggtttctgaaactgacct

SEQ ID NO: 889507 - DNA, 75 bp, synthetic construct
  source 1..75: mol_type = other DNA
ctttattatcatacaatgaagataaaaatacattaaaatacaaatatttaaaaaataacaaagataacgaacatt

SEQ ID NO: 889508 - DNA, 75 bp, synthetic construct
  source 1..75: mol_type = other DNA
gcaaaaaggccaatatttacttaaatgataaacgaatgatatcaagaagaaacgacccatcttcaagtgagtttt

SEQ ID NO: 889509 - DNA, 75 bp, synthetic construct
  source 1..75: mol_type = other DNA
cccacagccctggaatagtaatggacgggtggatgggtgcatacaaagagattgattctataattactaaagccg

SEQ ID NO: 889510 - DNA, 75 bp, synthetic construct
  source 1..75: mol_type = other DNA
acacgctgttcgccagcgcccatcccaccgctgaaaacacctttaaactcctgttggcgaagcgaacgcttgcct

SEQ ID NO: 889511 - DNA, 75 bp, synthetic construct
  source 1..75: mol_type = other DNA
cttgcaaagaaagttgcgcataataaaaatgggttcgataggctgacaaaagatttatgggactcaagggatttg

SEQ ID NO: 889512 - DNA, 75 bp, synthetic construct
  source 1..75: mol_type = other DNA
gcgattaatccggcgtacaccagtcagaaatgcgcatgttgtgggcatacatcgaaaaataaccgcaggacgcag

SEQ ID NO: 889513 - DNA, 75 bp, synthetic construct
  source 1..75: mol_type = other DNA
ggataccaatttattacacaaatgatctagcggtaatggtcccggtgattgccgaaggcgatacacctcaaaagg

SEQ ID NO: 889514 - DNA, 75 bp, synthetic construct
  source 1..75: mol_type = other DNA
tgaaaaaaaattaattcatgaaaagctcacatacattataaaaagcttcaatgtaaaaaaagcaatttttattta

SEQ ID NO: 889515 - DNA, 75 bp, synthetic construct
  source 1..75: mol_type = other DNA
tacatgatcgacaaagaaatcgctcgcggagaattggtggagttaatggcagataaagtgttgccagtggaaatg

SEQ ID NO: 889516 - DNA, 75 bp, synthetic construct
  source 1..75: mol_type = other DNA
cttgcaatgcaagcgcaaaccagcaatgagagcagaagttataactctgacaacgttgaccagaaaatatgaagg

SEQ ID NO: 889517 - DNA, 75 bp, synthetic construct
  source 1..75: mol_type = other DNA
cccgcactacagctccacttcgacttacgcaaggatgttcgcgggaagtttatggccaaacaggagacgctgctc

SEQ ID NO: 889518 - DNA, 75 bp, synthetic construct
  source 1..75: mol_type = other DNA
ggcatcggcatcggtctggcggggagtacctatgacaatacctatcccgatgaactggcggtaaaaaactttgtg

SEQ ID NO: 889519 - DNA, 75 bp, synthetic construct
  source 1..75: mol_type = other DNA
ctgggctctttaaatgtttctgggcatttagagaaagtttttaatggagaaggcccgcaatggctaaagcaaatt

SEQ ID NO: 889520 - DNA, 75 bp, synthetic construct
  source 1..75: mol_type = other DNA
attcgcatctgcttatgctaaaactggtaaaaaaggaatcacgtttgatgccatgaaggcatggcgaagtaaact

SEQ ID NO: 889521 - DNA, 75 bp, synthetic construct
  source 1..75: mol_type = other DNA
gcaccgcagcttcccgccgcagagcacaccgggctgagcttcagagtctggaggcatcaagcgctgataaactgc

SEQ ID NO: 889522 - DNA, 75 bp, synthetic construct
  source 1..75: mol_type = other DNA
ggtcggtatgcgatagagaaagcagttcaggaagccacgaaagcagtaagagctggcggaagtaaagaagcatta

SEQ ID NO: 889523 - DNA, 75 bp, synthetic construct
  source 1..75: mol_type = other DNA
gtgttatcaagcgccacggaaaactgcgcatcggatatgtgccgcagaagctgtatctcgacaccacgttgccac

SEQ ID NO: 889524 - DNA, 75 bp, synthetic construct
  source 1..75: mol_type = other DNA
attcagtacatatatggggcaggttatttctgaatttatgcatagtactgagagatcccctcataatttccccaa

SEQ ID NO: 889525 - DNA, 75 bp, synthetic construct
  source 1..75: mol_type = other DNA
gtaaaagcaatacgtgatgcagtcggaaacgaagagtttcagcgcttagcgagggctggtattgtggcatcgcta

SEQ ID NO: 889526 - DNA, 75 bp, synthetic construct
  source 1..75: mol_type = other DNA
tagcgggtcacctgaagaacacccggcaacagtagagttgttaacggggccttttttgataattaaacacaacga

SEQ ID NO: 889527 - DNA, 75 bp, synthetic construct
  source 1..75: mol_type = other DNA
cactacataaagtaagcggttcgcccgaagaacttccagcaactgtagaattattgacaggcccattccttatta

SEQ ID NO: 889528 - DNA, 75 bp, synthetic construct
  source 1..75: mol_type = other DNA
tgggaccggtggggatttcagtgcccagtactcccaccggaacgtatatagcatccccacaatttttcattacgg

SEQ ID NO: 889529 - DNA, 75 bp, synthetic construct
  source 1..75: mol_type = other DNA
tcgctggagatatcggttccgccggaaacatgattgcaggttctcttgctgatgctgcaaatcaggagggcgact

SEQ ID NO: 889530 - DNA, 75 bp, synthetic construct
  source 1..75: mol_type = other DNA
aaagcattgccggagtgtcatggctgattgtccttgctctgtcatgctggggcggcctggtccgataccttattg

SEQ ID NO: 889531 - DNA, 75 bp, synthetic construct
  source 1..75: mol_type = other DNA
acttagcatttactttcagcacaatacctatacttgcgatagctggacctattaaacaatattttcaacctcata

SEQ ID NO: 889532 - DNA, 75 bp, synthetic construct
  source 1..75: mol_type = other DNA
atggccccgtcgattgctaaagaaggcaagatctcaaccgtcgtgccaatgtgcagccatgttgatcacagcgaa

SEQ ID NO: 889533 - DNA, 75 bp, synthetic construct
  source 1..75: mol_type = other DNA
accgccgccagtacaagaaagcgacgtaaaaccggacgccatcgatctgacagcagaagccagagagcgcaagca

SEQ ID NO: 889534 - DNA, 75 bp, synthetic construct
  source 1..75: mol_type = other DNA
ggctgatttgaccgaagctatcacgaatttacgtacttaccgcgaccggcttcagggagaagccgaccagtttca

SEQ ID NO: 889535 - DNA, 75 bp, synthetic construct
  source 1..75: mol_type = other DNA
agctctgggatcctgacacctgcccggtggccctgctgccttatctggcgtgggcgctgtccgtggacaggtggg

SEQ ID NO: 889536 - DNA, 75 bp, synthetic construct
  source 1..75: mol_type = other DNA
attgtgcaggacatttacggggatgtgtacgccggcggggcggtattttgcggcgacactattgaggtttatccg

SEQ ID NO: 889537 - DNA, 75 bp, synthetic construct
  source 1..75: mol_type = other DNA
aatgttactggcatttagtcaaggtgaaatcgtggccgcatattggaactgggttgtaaatccaattgattacaa

SEQ ID NO: 889538 - DNA, 75 bp, synthetic construct
  source 1..75: mol_type = other DNA
atgatgcgccaatcacttcaggctgtttcacctgaaatttcaggcaataaaacgttatcactgcgtaaatcggta

SEQ ID NO: 889539 - DNA, 75 bp, synthetic construct
  source 1..75: mol_type = other DNA
ggtaccggtcttacagatgtctggggaagcagtgaatttgagtttatttgtaataaagaaaatagccaaatctgt

SEQ ID NO: 889540 - DNA, 75 bp, synthetic construct
  source 1..75: mol_type = other DNA
aagtgtcagcgagagtaaaaaattatggtgaccattttaccgttgactcaataaggcagatgtgggacgcagcga

SEQ ID NO: 889541 - DNA, 75 bp, synthetic construct
  source 1..75: mol_type = other DNA
tgagaagagggctattattgcagttattattgcatcatttttattaacttatggaggaatatcagtttttgttgt

SEQ ID NO: 889542 - DNA, 75 bp, synthetic construct
  source 1..75: mol_type = other DNA
ggggcggtatatcactcaggatccgattggactgaaggggggatggaatttttatcagtatccgttgaatccgat

SEQ ID NO: 889543 - DNA, 75 bp, synthetic construct
  source 1..75: mol_type = other DNA
ttagaattaggaaaaaatgaggggtctttagtttacggaaccggagctgaaaatgcagaagatgtagctaagcaa

SEQ ID NO: 889544 - DNA, 75 bp, synthetic construct
  source 1..75: mol_type = other DNA
cctcgattggtgtgctgaacacacttatacattgggtggtttttggtgtatgtatctatgccgcgcacaccaatc

SEQ ID NO: 889545 - DNA, 75 bp, synthetic construct
  source 1..75: mol_type = other DNA
gcggaagatcaggcggaacgattcaaagagcaggtaaaagccaaagaagcaggagacgaggaggcgatgtattat

SEQ ID NO: 889546 - DNA, 75 bp, synthetic construct
  source 1..75: mol_type = other DNA
actcatgaagatttaactaaaaaagacattaatgtcattatggctggacgtataatgtccagacggataatgggt

SEQ ID NO: 889547 - DNA, 75 bp, synthetic construct
  source 1..75: mol_type = other DNA
ataactgctaatggtactttctgggtacacccaaatgctacaaaacatatggctgaatatttgactcggaacggt

SEQ ID NO: 889548 - DNA, 75 bp, synthetic construct
  source 1..75: mol_type = other DNA
agaagccacatggggcgggctggttccgtcactggcgcgggaataccgttatgacagcgcgggcaatgtgtcggc

SEQ ID NO: 889549 - DNA, 75 bp, synthetic construct
  source 1..75: mol_type = other DNA
gggaaaactgaagaatctggcgagactcggcaaactggggaacctgctggggaaaagcgggaagctgctgggggc

SEQ ID NO: 889550 - DNA, 75 bp, synthetic construct
  source 1..75: mol_type = other DNA
gaagattttgacacagtaatatcccgtttagataaaaacaatcatttaggagtaagccaatatagtaatgttgat

SEQ ID NO: 889551 - DNA, 75 bp, synthetic construct
  source 1..75: mol_type = other DNA
ctcttgtttacggaaccggagctgctaatgcagaagacgttgctaagcaaatagcatctgggttgcctcttctag

SEQ ID NO: 889552 - DNA, 75 bp, synthetic construct
  source 1..75: mol_type = other DNA
tagtagttattgatgaggcccaatcaatttctgacgaaattagggggatgatattacaggattgcctagacaaaa

SEQ ID NO: 889553 - DNA, 75 bp, synthetic construct
  source 1..75: mol_type = other DNA
caaatgagttatatgtcagaaaacaaaagttaagacaacttcgcgcccgaacgcctgttgtatttcccaatgact

SEQ ID NO: 889554 - DNA, 75 bp, synthetic construct
  source 1..75: mol_type = other DNA
aaagaaccatactacggatatcataatggtgatatccgcgatcttatatcaggagatggatgcatcgaattattg

SEQ ID NO: 889555 - DNA, 75 bp, synthetic construct
  source 1..75: mol_type = other DNA
agaatatcagcatcctatcttgaaaatataatcccaaactctaatcctacgataagcacggcaaaagagtggcta

SEQ ID NO: 889556 - DNA, 75 bp, synthetic construct
  source 1..75: mol_type = other DNA
cttatacttataatactaggttaagatcattaatttcactactgtcatggggggtaatttattttcttttgttat

SEQ ID NO: 889557 - DNA, 75 bp, synthetic construct
  source 1..75: mol_type = other DNA
cgccatgcgtaagttatgactgtcccactggtccttctgaaataattattcatgaaaaaaatggtgttttagtac

SEQ ID NO: 889558 - DNA, 75 bp, synthetic construct
  source 1..75: mol_type = other DNA
ataaaatattgaatatattctggaaggaagagattgattccagtaaccactttatatttcttttagagtatatat

SEQ ID NO: 889559 - DNA, 75 bp, synthetic construct
  source 1..75: mol_type = other DNA
acataataaaatagcaacgaaagggaaaatccttccagccacaattgaaatgataacatctgggatgatttttta

SEQ ID NO: 889560 - DNA, 75 bp, synthetic construct
  source 1..75: mol_type = other DNA
caacgttgaccagaaaatatgaaggttcaacttgtcttccaaacgtagccatttacgcggcaggctaccggaaat

SEQ ID NO: 889561 - DNA, 75 bp, synthetic construct
  source 1..75: mol_type = other DNA
aaaccaccctgaccacaccggcaggacgtgaggggctttctccccgtgtcagttacggaaagggtactgagggat

SEQ ID NO: 889562 - DNA, 75 bp, synthetic construct
  source 1..75: mol_type = other DNA
ctaaatttaaaaaatgataatattgagaatacattaatgaaattttcggagaaaaaagtttgtgatgaatactat

SEQ ID NO: 889563 - DNA, 75 bp, synthetic construct
  source 1..75: mol_type = other DNA
cggcttagtgatctcgcctcaatccccgttgtcagcgggttacatcaccctgcgggcatgccgcaggtcactgcc

SEQ ID NO: 889564 - DNA, 75 bp, synthetic construct
  source 1..75: mol_type = other DNA
ctcaaggttgctgacctacatttctcagtggtcgatctttaagaaagcaccgacccccccatcatctgttgaata

SEQ ID NO: 889565 - DNA, 75 bp, synthetic construct
  source 1..75: mol_type = other DNA
cagtgtaaatgtcaccaacgagattgtacatatattaccggggattagctctgaaagggtaactgttcgtccttt

SEQ ID NO: 889566 - DNA, 75 bp, synthetic construct
  source 1..75: mol_type = other DNA
gcgccttcttactggagcaggcaaagcagcaagccgccagcatgagagccgaagccaaccgcaaagcaccgcgta

SEQ ID NO: 889567 - DNA, 75 bp, synthetic construct
  source 1..75: mol_type = other DNA
atgccaccgcgcaaacgtaaacttacccccaggttagccgaagaaatttgcttgctgatactggagggaaagtca

SEQ ID NO: 889568 - DNA, 75 bp, synthetic construct
  source 1..75: mol_type = other DNA
cagactcagtagaactgtttacccggaagtttaaaagcgcctgggctacccaaaaaaacagaataaaaaataggg

SEQ ID NO: 889569 - DNA, 75 bp, synthetic construct
  source 1..75: mol_type = other DNA
cagggaaatgaaagtctggaggttaagcagagccgtggtgttcgtgacggtgagcagggaattctggttgcactg

SEQ ID NO: 889570 - DNA, 75 bp, synthetic construct
  source 1..75: mol_type = other DNA
ctgttgatggtgtattttttccatatctaatacttttattatgcttgatattctttagtgttattataatacttt

SEQ ID NO: 889571 - DNA, 75 bp, synthetic construct
  source 1..75: mol_type = other DNA
atcattcaggacgtaccgggttacatgtacaccggcggcatcgcctacgacggcgacatcattacaatttatccg

SEQ ID NO: 889572 - DNA, 75 bp, synthetic construct
  source 1..75: mol_type = other DNA
aagtacacgtttattgatcgatattttcacagccagcgcgagctgttggacatcaggcattctgaagagcgggac

SEQ ID NO: 889573 - DNA, 75 bp, synthetic construct
  source 1..75: mol_type = other DNA
gcctggtggccgacgcgcgcccggtcagtcgccacctgatcggcctgaacatcattcaggacgtaccgggttaca

SEQ ID NO: 889574 - DNA, 75 bp, synthetic construct
  source 1..75: mol_type = other DNA
catataaaaactaattctacatcactatatcaatggtttttcttacctatcaaaaaagccttaaagagggaacct

SEQ ID NO: 889575 - DNA, 75 bp, synthetic construct
  source 1..75: mol_type = other DNA
ggttaataacaatcaaaagaatgaagatatcataaataaataccaagagctattaaaagccatagacgtaacaaa

SEQ ID NO: 889576 - DNA, 75 bp, synthetic construct
  source 1..75: mol_type = other DNA
gcagtggtgaattacgtctgaacggcatgatgccggaacgctggcgggtgtcactgccggtaagtattgagtacc

SEQ ID NO: 889577 - DNA, 75 bp, synthetic construct
  source 1..75: mol_type = other DNA
ctattatcagcttcctaccttcctgtgtactggcctggaatactccgggagaggatttcagcggagagattaagc

SEQ ID NO: 889578 - DNA, 75 bp, synthetic construct
  source 1..75: mol_type = other DNA
gattgaaggtgtctatggtgcgcagataatggcggggtacggggaattgcgtctgagtggtgatgtccctgaacg

SEQ ID NO: 889579 - DNA, 75 bp, synthetic construct
  source 1..75: mol_type = other DNA
cctcaacatcgccaggcgtttatgagggcgtagatggcgtgatgcgggtgatcgaacagcttgccggagtcggtt

SEQ ID NO: 889580 - DNA, 75 bp, synthetic construct
  source 1..75: mol_type = other DNA
tgggattttggttgctatctgctgttgatggcaatgttgttgctaccgtggatacaacaaagccttcgcatccgc

SEQ ID NO: 889581 - DNA, 75 bp, synthetic construct
  source 1..75: mol_type = other DNA
cagggaaatgaaggtctggaggttaaacagagccgcggtgttcgtgacggtgagcaggcaattccgggcgcactg

SEQ ID NO: 889582 - DNA, 75 bp, synthetic construct
  source 1..75: mol_type = other DNA
taataccgaaatccttaactattttcaccctatgccaggcactgaaaataatggcaatcgtacctggatggcggc

SEQ ID NO: 889583 - DNA, 75 bp, synthetic construct
  source 1..75: mol_type = other DNA
taaagaaattgccgataagttattacttagcaataaaacagttagtgcgcataaatctaatatttatggcaagct

SEQ ID NO: 889584 - DNA, 75 bp, synthetic construct
  source 1..75: mol_type = other DNA
cctgaaaaggatcaaacaaatccagagcacagtgaaagtattatttttatcatcgaaatcagaatgcttttatgc

SEQ ID NO: 889585 - DNA, 75 bp, synthetic construct
  source 1..75: mol_type = other DNA
ttaaatgatctgctggcttatgacagcaagaccaacaccgggaatatgaaggaactggttaacgcgcaaaatgca

SEQ ID NO: 889586 - DNA, 75 bp, synthetic construct
  source 1..75: mol_type = other DNA
ggcctgcacagccatgacattagctgccacgcggaacgcttcaacggtgaatgcagccatgttgaaattaatcgc

SEQ ID NO: 889587 - DNA, 75 bp, synthetic construct
  source 1..75: mol_type = other DNA
gttacgaaatggatccccagctcctgacacactttaaccagcatctggattcattattcggggtctattcgaaac

SEQ ID NO: 889588 - DNA, 75 bp, synthetic construct
  source 1..75: mol_type = other DNA
cgaggtgggagagaaactggtcgggtatgcctgggtgatggaatatacagaacgtaatgaaccgccccgggtttc

SEQ ID NO: 889589 - DNA, 75 bp, synthetic construct
  source 1..75: mol_type = other DNA
ataacaaacagcacacattctatctcgaagcggattacacgcagggtaacctctttgatcagaagcaagtcaacg

SEQ ID NO: 889590 - DNA, 75 bp, synthetic construct
  source 1..75: mol_type = other DNA
gcgcagaacataaaaacctgtatccgcatatcaacgcctcgcgtccgcgtccgctggacccggccgttatctcat

SEQ ID NO: 889591 - DNA, 75 bp, synthetic construct
  source 1..75: mol_type = other DNA
tatacctacattatcaacaccacctcaggccgtcgtgcgattgaagactcccgcgtgatccgtcgcagtgcgctg

SEQ ID NO: 889592 - DNA, 75 bp, synthetic construct
  source 1..75: mol_type = other DNA
tatcgtccaggtggcaacgaatattctggtgaccatgaatctggtgggcatggggcagggcgtcactttgatacc

SEQ ID NO: 889593 - DNA, 75 bp, synthetic construct
  source 1..75: mol_type = other DNA
ctcactcctgatgcgccactcctgacgccagacgctttagcgccgtggtcacgagtgcaggccaaaattgctgca

SEQ ID NO: 889594 - DNA, 75 bp, synthetic construct
  source 1..75: mol_type = other DNA
tgcaacagctgggattctccctggtagaaggtgaagttgatttggcgctacccgtgaacaatgtcagtgatagcg

SEQ ID NO: 889595 - DNA, 75 bp, synthetic construct
  source 1..75: mol_type = other DNA
cgggatgggcgatgcgctctcgacctggtttgaagcgaaagcctgttatgacgccagagcgaccagcatggcggg

SEQ ID NO: 889596 - DNA, 75 bp, synthetic construct
  source 1..75: mol_type = other DNA
tccgggaaaggatttctgcgtcaatgtgtgatttacgatccgcactcgcacggtcttatccattcgctctgctgg

SEQ ID NO: 889597 - DNA, 75 bp, synthetic construct
  source 1..75: mol_type = other DNA
ctggcccgtaacaaaaattaccgaaatattgtgttagttgatgagaaagacttgctcttttatgggcgcgttgag

SEQ ID NO: 889598 - DNA, 75 bp, synthetic construct
  source 1..75: mol_type = other DNA
tttaaatgttaatggcgatgccgggaagattggtgttttaactgcgccgctgtatgcatcagctattgagaaagc

SEQ ID NO: 889599 - DNA, 75 bp, synthetic construct
  source 1..75: mol_type = other DNA
ggctctgaggaattgtatcttctacagtctattcgctatgacaatgggggcggatcaaattataggactttaaac

SEQ ID NO: 889600 - DNA, 75 bp, synthetic construct
  source 1..75: mol_type = other DNA
ttcctgtttcgcaaccaataatcattaacgctgctggatatccggtatataacgggcagattgccaaattcgtta

SEQ ID NO: 889601 - DNA, 75 bp, synthetic construct
  source 1..75: mol_type = other DNA
aaccatccccggaaatccgaagcgctggcgtgagtcagaaatcaagtcatgggaagacaaggtcaactttgctaa

SEQ ID NO: 889602 - DNA, 75 bp, synthetic construct
  source 1..75: mol_type = other DNA
cagaagaacttatgcgcggagaagctgcatcgctgtttaaactggcagatgagttaagcgatgtaacagaacaac

SEQ ID NO: 889603 - DNA, 75 bp, synthetic construct
  source 1..75: mol_type = other DNA
tgatacgctgctggcggaaggcgaaaaagcacgcctggcggctcaggctggagtggtgaccgatgcgctggagcg

SEQ ID NO: 889604 - DNA, 75 bp, synthetic construct
  source 1..75: mol_type = other DNA
acaattgcctcaaccgatgcgccgaccagcgcgctgtcggttatctacaccgaggcgggcgagtttgaagagtat

SEQ ID NO: 889605 - DNA, 75 bp, synthetic construct
  source 1..75: mol_type = other DNA
ttactctcaatgaggcagcatctggaagcggtgcaattgtgtggaaggctactctccctgtaactgttacctaca

SEQ ID NO: 889606 - DNA, 75 bp, synthetic construct
  source 1..75: mol_type = other DNA
aatattacccaggagtcttggtatatagctaagcttttcggtgaagactatgtcgagaactataacgatcaaggc

SEQ ID NO: 889607 - DNA, 75 bp, synthetic construct
  source 1..75: mol_type = other DNA
acagactggtatcagtccgcagattaatttcagtgacgctgttgatctcgattcgtttaaaaatggtagagcagt

SEQ ID NO: 889608 - DNA, 75 bp, synthetic construct
  source 1..75: mol_type = other DNA
ggggacgaagacgcagatgaccattcgttcgaaaacctataagggcagcgggtttaatgaactgaagtttgacga

SEQ ID NO: 889609 - DNA, 75 bp, synthetic construct
  source 1..75: mol_type = other DNA
ccggaagcggatgtgacgctgatagacctggggcacctggcccgtgaggggtatgaggcgcagatggcgctgacc

SEQ ID NO: 889610 - DNA, 75 bp, synthetic construct
  source 1..75: mol_type = other DNA
cgggctttcagtgaacaaaatcagtgtcaaaccggggagcggtgtgacactgccgccctttgcggatgcgcataa

SEQ ID NO: 889611 - DNA, 75 bp, synthetic construct
  source 1..75: mol_type = other DNA
agccctgctgtacagttccgcgtgaattacagaaatggcggtatcttttatcgttcagcgcgtgatggttatggc

SEQ ID NO: 889612 - DNA, 75 bp, synthetic construct
  source 1..75: mol_type = other DNA
attatccgtcaactccatgagcttaaaacattggctccagatgttgttgtaccttcctacgagtatgtagaaaca

SEQ ID NO: 889613 - DNA, 75 bp, synthetic construct
  source 1..75: mol_type = other DNA
gtggaagttattggcactcgcggcgcaatgaccatacgcgttaccacgccgagcacgtccagtggtggcggaatt

SEQ ID NO: 889614 - DNA, 75 bp, synthetic construct
  source 1..75: mol_type = other DNA
acctggggcacctggcccgtgaggggtatgaggcgcagatggcgctgaccatggtgtcgatgaccaacatgatca

SEQ ID NO: 889615 - DNA, 75 bp, synthetic construct
  source 1..75: mol_type = other DNA
gcctgcaaacatctccagtcattttttatcatcaggagacgtcacaaaatgcaaaatatagtgaaacagacaaga

SEQ ID NO: 889616 - DNA, 75 bp, synthetic construct
  source 1..75: mol_type = other DNA
caaagggaatgaaagacgatggaactgactcgatggctaatgttgataaatatgaaaacccatttcgtaaagagt

SEQ ID NO: 889617 - DNA, 75 bp, synthetic construct
  source 1..75: mol_type = other DNA
tgataaagctgttggctggaactggaatagcggggtctataacgcaaacattggtggcgcatcgacattaatcct

SEQ ID NO: 889618 - DNA, 75 bp, synthetic construct
  source 1..75: mol_type = other DNA
agggtatgtgaaacctcacgcgcagggaacggcgtttacggaagcctggctgggcgaaatggaacgccatttgcg

SEQ ID NO: 889619 - DNA, 75 bp, synthetic construct
  source 1..75: mol_type = other DNA
tcaaaaagctaatcaaaaaaatatttttcctgagctatacaatgatcaatgtaataaaattccctcctcatcgat

SEQ ID NO: 889620 - DNA, 75 bp, synthetic construct
  source 1..75: mol_type = other DNA
ttcagcgcgtgatggttatggctttgaagctgactggtcagagttttacaccacaacccgcaaaccctctgcggg

SEQ ID NO: 889621 - DNA, 75 bp, synthetic construct
  source 1..75: mol_type = other DNA
tgtggctcgccacccagaacctggcggattttcctgatgaggcgaagaagctgctcaatatgatcgaatggtggg

SEQ ID NO: 889622 - DNA, 75 bp, synthetic construct
  source 1..75: mol_type = other DNA
atgacgaatgcatttttgtctgtagctcgtcaaaaagccatcaccgccggttacccggtggttgatactgatgac

SEQ ID NO: 889623 - DNA, 75 bp, synthetic construct
  source 1..75: mol_type = other DNA
acctaataggcaatggacagttggaaatgatcctagaagaaggggacaaacaaattataaatattcggaagattt

SEQ ID NO: 889624 - DNA, 75 bp, synthetic construct
  source 1..75: mol_type = other DNA
tagcacaggtgcaggaaactggacgacggcacaattgattgaatggctggattctcaaggggcattcaatcaccc

SEQ ID NO: 889625 - DNA, 75 bp, synthetic construct
  source 1..75: mol_type = other DNA
gtcgacggcccgcagagcgccgtcgtgacgggaccggcaggcgaggaaatcttctgtgatgaacatggccgcgtg

SEQ ID NO: 889626 - DNA, 75 bp, synthetic construct
  source 1..75: mol_type = other DNA
tgctggatccgtgtggcacaggcgtgggcaggcaccggttttggccacctggcgataccgcgtgtgggtcaggag

SEQ ID NO: 889627 - DNA, 75 bp, synthetic construct
  source 1..75: mol_type = other DNA
tcgcagactggggagaaatgttcggagatcacgtgctggcaacagcgatcctggactggctgctacactacatca

SEQ ID NO: 889628 - DNA, 75 bp, synthetic construct
  source 1..75: mol_type = other DNA
taagcccttacgacacggcattgtttcctctgattctcgcgcacaacaactggttgcaagctggaaagaacaagg

SEQ ID NO: 889629 - DNA, 75 bp, synthetic construct
  source 1..75: mol_type = other DNA
gtggtgtttcacgggctggaaggcagtctcaatagcccttacgcccacggtctggttgaggcggcgcaaaagccg

SEQ ID NO: 889630 - DNA, 75 bp, synthetic construct
  source 1..75: mol_type = other DNA
ttttgagagcctcgggctgagcgtcaacaaaatcagcgtgaaaccgggcaccggtgtcagcctgccaccgtttgc

SEQ ID NO: 889631 - DNA, 75 bp, synthetic construct
  source 1..75: mol_type = other DNA
gtggccctgatgcagtcctcgcagatcggtttgcataagtcgttgatggtcgggctgggttatgacgtcaaagtc

SEQ ID NO: 889632 - DNA, 75 bp, synthetic construct
  source 1..75: mol_type = other DNA
cggacatgtactgagactgattctccctactatccaattcggcaggttcaggaaaaagaattactaagaaagtat

SEQ ID NO: 889633 - DNA, 75 bp, synthetic construct
  source 1..75: mol_type = other DNA
ataacttttccgggctgctgaaagatgaggagcttcctgcaggtgatttgcagacggtgctgctcgttttgtcgg

SEQ ID NO: 889634 - DNA, 75 bp, synthetic construct
  source 1..75: mol_type = other DNA
tctgacactgaaaaacagggagaaaaccctgatagttgatgcccttaagaaaaagtaccccgttgctgagttgct

SEQ ID NO: 889635 - DNA, 75 bp, synthetic construct
  source 1..75: mol_type = other DNA
aaaaatcaggatgctttactcggtgaaatccagcgactcaggcagcaggttcatcagctgcagctcgaacgtgac

SEQ ID NO: 889636 - DNA, 75 bp, synthetic construct
  source 1..75: mol_type = other DNA
gaaaaggttgtccgcagactgatggcagaagagcagctcgttgttaagcgcaccaggcgacgacgatacaactct

SEQ ID NO: 889637 - DNA, 75 bp, synthetic construct
  source 1..75: mol_type = other DNA
gccaaccagcattaacttatgcaggcgttgtcattggtggtacgcgggtggtttacttaagtaataatgctgata

SEQ ID NO: 889638 - DNA, 75 bp, synthetic construct
  source 1..75: mol_type = other DNA
tgggccagtcttgagatcagactcattcccgaaactgacttcaggcgacatatatcaatgacgttggtgcaataa

SEQ ID NO: 889639 - DNA, 75 bp, synthetic construct
  source 1..75: mol_type = other DNA
aatctcaaaaaacacctccacttaccgatgccgaactggaaaagttatctcccgaagaactacgggcgaaactcc

SEQ ID NO: 889640 - DNA, 75 bp, synthetic construct
  source 1..75: mol_type = other DNA
tacgatataaactgcaaaatgattttgctgttgaaagctatcacttcgaatttggggcgaatcataatatctata

SEQ ID NO: 889641 - DNA, 75 bp, synthetic construct
  source 1..75: mol_type = other DNA
cctcactggcggcatggcgtcagggcggcgctacgctgggcctgctgctgtgcacggtgggattcgtgccagtga

SEQ ID NO: 889642 - DNA, 75 bp, synthetic construct
  source 1..75: mol_type = other DNA
aaagtgcctcccgtcgcctgcagctctcccgtggtgacattgacattgccgatgcgctgccggtggatcaactca

SEQ ID NO: 889643 - DNA, 75 bp, synthetic construct
  source 1..75: mol_type = other DNA
tgccgttatgctgaatttactggtttttattcgttccagtgaactcagatatgcccgctggtctgaaattgatat

SEQ ID NO: 889644 - DNA, 75 bp, synthetic construct
  source 1..75: mol_type = other DNA
agttgtcggctgggcgcgtcctgaagtgacaccgcccagaaatgggagaactaataaagcgttaagagctttagg

SEQ ID NO: 889645 - DNA, 75 bp, synthetic construct
  source 1..75: mol_type = other DNA
atactgttccggtatcgcccgcattcttatcaaaacttctcgccaatgttaaaaacaatatattttgtaaactcg

SEQ ID NO: 889646 - DNA, 75 bp, synthetic construct
  source 1..75: mol_type = other DNA
aaacatcgatcgacgatggcttttatgtacggatggttgatggtaaaaaaaatacgatagccttagatagtcttt

SEQ ID NO: 889647 - DNA, 75 bp, synthetic construct
  source 1..75: mol_type = other DNA
atcccgtttatggtggggggcgtatggttaaaaatacgggtaatgagccgtgggataatgcctatgagcgtaatt

SEQ ID NO: 889648 - DNA, 75 bp, synthetic construct
  source 1..75: mol_type = other DNA
gcagcaataccatatacgagtgatgatcgtgaacgtgcccggcagatgtttgaatatcggcaacgtcgggttgtt

SEQ ID NO: 889649 - DNA, 75 bp, synthetic construct
  source 1..75: mol_type = other DNA
gacgtatctgcaaggtattgctcaacaatgattattggtgtcgggcattatcattcagccccacaaaagccaaaa

SEQ ID NO: 889650 - DNA, 75 bp, synthetic construct
  source 1..75: mol_type = other DNA
aacgtgagcgcgaacaactggttccttatccgcgtttttttgccagtctggcgggctttgttacggcaggtgtga

SEQ ID NO: 889651 - DNA, 75 bp, synthetic construct
  source 1..75: mol_type = other DNA
atacgccctgaaccagtggccggcgctgacgtactatgcagatgatgacctggttgcagatttttttatgggctc

SEQ ID NO: 889652 - DNA, 75 bp, synthetic construct
  source 1..75: mol_type = other DNA
caatagaatttgaccataatgatgcgaaggatatgaatactattgcagattatattagagatgaactggcgtctt

SEQ ID NO: 889653 - DNA, 75 bp, synthetic construct
  source 1..75: mol_type = other DNA
agctggtacatataccccatctacgactggaaagtcgccgatatctggacctggtatgctaaaaatcaaagcctc

SEQ ID NO: 889654 - DNA, 75 bp, synthetic construct
  source 1..75: mol_type = other DNA
gtgacgagctggaacaatataatttatggctggattatctggacgcactggaactggttgatacctccagtgctc

SEQ ID NO: 889655 - DNA, 75 bp, synthetic construct
  source 1..75: mol_type = other DNA
atggctggattatctggacgcactggagctggtcgatacttccggtgcgccagatattgaatggcctacgcctcc

SEQ ID NO: 889656 - DNA, 75 bp, synthetic construct
  source 1..75: mol_type = other DNA
tatatcatgttcttgaacctgaccgatgggccgcaatgtgcgcccgggtcagtggcataaaaagcggtggaattt

SEQ ID NO: 889657 - DNA, 75 bp, synthetic construct
  source 1..75: mol_type = other DNA
tctgcttttaccagccaggcatgaccttcgaacaatttgtacgtgagtttgccgaatggttttcacaaaaacgtc

SEQ ID NO: 889658 - DNA, 75 bp, synthetic construct
  source 1..75: mol_type = other DNA
ctgggcggccatgtgcgcacgagccagcggagtaaaaagtggcggcatttacgccggacatgacaaccatttttt

SEQ ID NO: 889659 - DNA, 75 bp, synthetic construct
  source 1..75: mol_type = other DNA
gattccggaaggcatgtggggctacgatgcgacggcaatgcaatacaaccatgacgaaacgaaagccaaagccga

SEQ ID NO: 889660 - DNA, 75 bp, synthetic construct
  source 1..75: mol_type = other DNA
tagatcatatatcagatgaacattttttttcaggtgatattcccaatgattgtgctatttttagtccgatagtac

SEQ ID NO: 889661 - DNA, 75 bp, synthetic construct
  source 1..75: mol_type = other DNA
ggagaggcgtttacgtcttccggtgcggcggatactggacatcatgcatcgttcggaacttggcaagccgctgcc

SEQ ID NO: 889662 - DNA, 75 bp, synthetic construct
  source 1..75: mol_type = other DNA
atggcacgaaacaagcaagcctctcagcgaacggcacaggccaccgctgatggctatgagaactttgtcgcccgc

SEQ ID NO: 889663 - DNA, 75 bp, synthetic construct
  source 1..75: mol_type = other DNA
gctcgcgagcagtcttacttcatcgataaaacggcagagcatagtgaaaaccgcctgtggatgatggccaacatg

SEQ ID NO: 889664 - DNA, 75 bp, synthetic construct
  source 1..75: mol_type = other DNA
tatcagtcacgcttacacatctgacgttgagttattgcgtagccatattctctggatatttagcaaagaggggca

SEQ ID NO: 889665 - DNA, 75 bp, synthetic construct
  source 1..75: mol_type = other DNA
atgagactatcagaacaacaacgccaaatcctcgactatcttagagaaaacgaatcaatcacagcacgagaggcc

SEQ ID NO: 889666 - DNA, 75 bp, synthetic construct
  source 1..75: mol_type = other DNA
gtggcggcccttcccggtgatcgcctctctgccgcactgatggttaaatcacacggcaccgtcagtgtcgacggt

SEQ ID NO: 889667 - DNA, 75 bp, synthetic construct
  source 1..75: mol_type = other DNA
tattggtcagattcgagatggctacaccagaattgctccatcaacaccatatgataagtgggatggtgaaaaatg

SEQ ID NO: 889668 - DNA, 75 bp, synthetic construct
  source 1..75: mol_type = other DNA
cttttccaatgctggagtatggatctacagaaaccccctgggaccttagaccattcctgtttcttggtggggctg

SEQ ID NO: 889669 - DNA, 75 bp, synthetic construct
  source 1..75: mol_type = other DNA
agcgaacggcacaggccaccgctgacggctacgagaacttcgtcgcccgcgttgggatgcagacgcctaaccagc

SEQ ID NO: 889670 - DNA, 75 bp, synthetic construct
  source 1..75: mol_type = other DNA
aagcgtcggcatggttccagcgatcagatgtcaccgacagaatatgaaaaccagtattatcaacggctcggaagt

SEQ ID NO: 889671 - DNA, 75 bp, synthetic construct
  source 1..75: mol_type = other DNA
atcaccgcatttgatttttattttgaagacaacgagcttatcccgttaccttcgccattaaatagtcacgatcac

SEQ ID NO: 889672 - DNA, 75 bp, synthetic construct
  source 1..75: mol_type = other DNA
aattcgcaagcgtgcgggctttacccatcgccgatgatgtcgcagggggaattttcttaatggtggcgatcttgg

SEQ ID NO: 889673 - DNA, 75 bp, synthetic construct
  source 1..75: mol_type = other DNA
aagcacaaggccgtgatgttagtgagcaggatggtttgatactggatgccattgatcgttatcaatctaaatttg

SEQ ID NO: 889674 - DNA, 75 bp, synthetic construct
  source 1..75: mol_type = other DNA
atagaggataaagggcaggagcgatacctgcatatcacattatcatttgcagaaaatgaaatatcagaagaaaca

SEQ ID NO: 889675 - DNA, 75 bp, synthetic construct
  source 1..75: mol_type = other DNA
gagaactgttcagggagtctgacatcaagagcggcgtacttcgcaaagctgtccgactgaggtacgcctttatcc

SEQ ID NO: 889676 - DNA, 75 bp, synthetic construct
  source 1..75: mol_type = other DNA
tattgagactggatgtaaaaagacagagagagaggcagatgcttttgctagtgctttcttatttcctcgaaagtc

SEQ ID NO: 889677 - DNA, 75 bp, synthetic construct
  source 1..75: mol_type = other DNA
ttctcatggccttcgttctgcttgttggcggttttagcatttcagaaagcgtcaaatattcatatgttgttgatc

SEQ ID NO: 889678 - DNA, 75 bp, synthetic construct
  source 1..75: mol_type = other DNA
gcgcctggctacacaccaacacaatggattgccaccatcaaatttgtctgggcaaaagacaaaatcacaactgaa

SEQ ID NO: 889679 - DNA, 75 bp, synthetic construct
  source 1..75: mol_type = other DNA
cggaagccttccgtaaacagcgcgccacgtctttatcttcccctgccggtccccgttctgcttcctcttcttctg

SEQ ID NO: 889680 - DNA, 75 bp, synthetic construct
  source 1..75: mol_type = other DNA
cagctcgctcctgccgtctcagcggcggcgccgttcctgtggccccgcagtcaccgccatccctggcggctccgg

SEQ ID NO: 889681 - DNA, 75 bp, synthetic construct
  source 1..75: mol_type = other DNA
acgggtgcaggccaaaattgcggcatcaaatacgggtgaactggatgccctgcaacagctgggattctccctggt

SEQ ID NO: 889682 - DNA, 75 bp, synthetic construct
  source 1..75: mol_type = other DNA
taataaataaatcccagaagatgacctcctatgattatttttttgaaggtggggggcccggttgtacttacgtct

SEQ ID NO: 889683 - DNA, 75 bp, synthetic construct
  source 1..75: mol_type = other DNA
gctggcgctccgctctgctgccgggtgcggtgttcttctgtggccccgcagtcgccgccatccctggcggctccg

SEQ ID NO: 889684 - DNA, 75 bp, synthetic construct
  source 1..75: mol_type = other DNA
cggtggcctgctgcatgtggcggaatgcaatccgggaacgaacgtcacctttctgccgttgccgcggtttaagcg

SEQ ID NO: 889685 - DNA, 75 bp, synthetic construct
  source 1..75: mol_type = other DNA
cgaaaagccagacgccaatgtctgggtcgatggtgcagtttccagctattaccgcgaaacctacgccgaagcaga

SEQ ID NO: 889686 - DNA, 75 bp, synthetic construct
  source 1..75: mol_type = other DNA
gcccggccatcgtgtttgcggccacggtctggctgctcggcaactggtggacggcgaacctgatgtacgtcggcc

SEQ ID NO: 889687 - DNA, 75 bp, synthetic construct
  source 1..75: mol_type = other DNA
ttgacgccaaccgctacctcggaaaatggtatgaaatagctcgcctcgagaactggttcgaacgtggtctggtga

SEQ ID NO: 889688 - DNA, 75 bp, synthetic construct
  source 1..75: mol_type = other DNA
agagtaattttctcaggaaaaacataaaattactgactaaatatttattttttgaatcgcagggcattccggata

SEQ ID NO: 889689 - DNA, 75 bp, synthetic construct
  source 1..75: mol_type = other DNA
cgccgttgcggaccggacggctgcgactccccgccaagcgcttgtgaaagacggctgaccgtgcgacacggcggc

SEQ ID NO: 889690 - DNA, 75 bp, synthetic construct
  source 1..75: mol_type = other DNA
tcacggcagcggtttcttctttactgaaaaaccggatgctaatgtctgggtcgatggcgcagtttccagctatta

SEQ ID NO: 889691 - DNA, 75 bp, synthetic construct
  source 1..75: mol_type = other DNA
aacgccagctggcagagcgggatgaagagctggccatcctccaaaaggccgcgacatacttcgcgaagcacctga

SEQ ID NO: 889692 - DNA, 75 bp, synthetic construct
  source 1..75: mol_type = other DNA
agagataaatttttatacattttccgttatattttgatggcattgatcagcgcattagtttttccacttgccttg

SEQ ID NO: 889693 - DNA, 75 bp, synthetic construct
  source 1..75: mol_type = other DNA
tcaccttatgctctatggatgacaaaagcctctatggtgatgatttgtatgtcattacgttctcaaaagccgtac

SEQ ID NO: 889694 - DNA, 75 bp, synthetic construct
  source 1..75: mol_type = other DNA
cctgagtggcaagggcataataagtgcgaaaaacgtctccagagttggtattgccgccagttgcgttccgctctt

SEQ ID NO: 889695 - DNA, 75 bp, synthetic construct
  source 1..75: mol_type = other DNA
tcaccgcctgacccattcagtgatcggcatggaatacatatattccttgaatccattagcgagcggtgggactga

SEQ ID NO: 889696 - DNA, 75 bp, synthetic construct
  source 1..75: mol_type = other DNA
tgaacggcctgaagggcatcatcgaatcaggctcactgtgggcgacgcacttttcctttctcaatgacagtaatg

SEQ ID NO: 889697 - DNA, 75 bp, synthetic construct
  source 1..75: mol_type = other DNA
tggacgttgtggagggtaatatctcggataacggcgtgttgtttgaagcgccaccgcagggtaatccgcgaatta

SEQ ID NO: 889698 - DNA, 75 bp, synthetic construct
  source 1..75: mol_type = other DNA
ttagagttattgctatattttttattgtaataatttattctctactatttggaggtgcaaaaaacatttcgactt

SEQ ID NO: 889699 - DNA, 75 bp, synthetic construct
  source 1..75: mol_type = other DNA
actgaacgtcagcgtctgaaagagctggaacgtgaaaatcatcgagtaggcagcctgacggctgcggcttgtcat

SEQ ID NO: 889700 - DNA, 75 bp, synthetic construct
  source 1..75: mol_type = other DNA
agcactggttcgtaaaagcgcactgttcaccggatggcgaagcgccagcgattgcagaagacccgcgcattgctg

SEQ ID NO: 889701 - DNA, 75 bp, synthetic construct
  source 1..75: mol_type = other DNA
tataaatatattttagatggctcattttcaaatttacagcatttatttcccaaaggacaactacagaagatacaa

SEQ ID NO: 889702 - DNA, 75 bp, synthetic construct
  source 1..75: mol_type = other DNA
aatcacctgacgattttttgataactggtcagagagaggacctttttacatataaatatattttagatggctcat

SEQ ID NO: 889703 - DNA, 75 bp, synthetic construct
  source 1..75: mol_type = other DNA
ccgcgatctggcgatcagcctggagatgatgctattccacgacgatgagccattaacgtttgatctgatctggcg

SEQ ID NO: 889704 - DNA, 75 bp, synthetic construct
  source 1..75: mol_type = other DNA
tcccgtgtggtgattgatccaagaggcgtgctgaagaagttcggtactgagcttccaccggagaaagaaattcgc

SEQ ID NO: 889705 - DNA, 75 bp, synthetic construct
  source 1..75: mol_type = other DNA
tattcgatattaataatcgattttggatttaacctgacggtaacaaaaaaaatatctttaaatagagatgataag

SEQ ID NO: 889706 - DNA, 75 bp, synthetic construct
  source 1..75: mol_type = other DNA
agaccgtattacctgaaaaaacaggaagcaatacatcattgctgcgtgattccgtatgccaggatctctttcaac

SEQ ID NO: 889707 - DNA, 75 bp, synthetic construct
  source 1..75: mol_type = other DNA
aggtcattcttaatacggttgacaaactcacccgcccattccgtgctgcacaggccagttcgaaagagctggctg

SEQ ID NO: 889708 - DNA, 75 bp, synthetic construct
  source 1..75: mol_type = other DNA
catacattgaccgaactggccttgcaaacagacaaaggcattgtgctggccagcacccttgttgaaaacctgcgg

SEQ ID NO: 889709 - DNA, 75 bp, synthetic construct
  source 1..75: mol_type = other DNA
cagactcctgcgcttgaagccgttaaaagagggctttcgatttccgatcgcggtaagctcattatggcatgcgga

SEQ ID NO: 889710 - DNA, 75 bp, synthetic construct
  source 1..75: mol_type = other DNA
tgatgttgctggaactggccgctatgccggtccgcgaatttgacattccgttgccgcagcatccggcgctgctgg

SEQ ID NO: 889711 - DNA, 75 bp, synthetic construct
  source 1..75: mol_type = other DNA
ttctctaagtgattatatattcatctttgcactcaccgagttttgggaatcactgtattcagaagcaagtacttt

SEQ ID NO: 889712 - DNA, 75 bp, synthetic construct
  source 1..75: mol_type = other DNA
ccgtcatcccctggaagagtatttaaacttgatgaagactctgtcgcggaccgacttgcagcccttgaagaaaaa

SEQ ID NO: 889713 - DNA, 75 bp, synthetic construct
  source 1..75: mol_type = other DNA
agtcatcttttgaaattgatgaaaagcgcgcagagcaattgcttcttgctgacaatgaccatactttttatatga

SEQ ID NO: 889714 - DNA, 75 bp, synthetic construct
  source 1..75: mol_type = other DNA
cggcacggcgtttcttgaacagttgctgattatgctgacgccagatcccgccgcattaaaagaagcgccggacga

SEQ ID NO: 889715 - DNA, 75 bp, synthetic construct
  source 1..75: mol_type = other DNA
cactctgcgggtatccgcagcaacggcattgagaaagtgctcgccggagaaacctctctcgatgaagttctgcgg

SEQ ID NO: 889716 - DNA, 75 bp, synthetic construct
  source 1..75: mol_type = other DNA
tgccggaacgcccttgtgaacaattaacccgctgcgccttatgtgtatgtgatcccaaacataagcacgggaatg

SEQ ID NO: 889717 - DNA, 75 bp, synthetic construct
  source 1..75: mol_type = other DNA
acacacaaacgccccggaaacagaataatccgtttcatagttcggttttgtgcactcatcctggcggtcggtttt

SEQ ID NO: 889718 - DNA, 75 bp, synthetic construct
  source 1..75: mol_type = other DNA
cagaaaaggattgccgtcctttcgcagcctctgaccaccaacgatagcaacagtatcgaggtagctatgagaaat

SEQ ID NO: 889719 - DNA, 75 bp, synthetic construct
  source 1..75: mol_type = other DNA
atcggtgtgtttggcgtaggcaaaaacatggtgtcttccatcaaacattggtcgctcgcatgcgggctacttgag

SEQ ID NO: 889720 - DNA, 75 bp, synthetic construct
  source 1..75: mol_type = other DNA
cgatgatagcctggtgcgccaaaccaactggcaattcagcgagtccttcactgcaaccacttctctgctggagct

SEQ ID NO: 889721 - DNA, 75 bp, synthetic construct
  source 1..75: mol_type = other DNA
tctttcatggcgatgcttaagcgttcgaataagtcagcatcaagacgaagctgtacggaaaacctttcctttttg

SEQ ID NO: 889722 - DNA, 75 bp, synthetic construct
  source 1..75: mol_type = other DNA
aacttattttattggagataaaccagtcagaactcgacaactaattattttgcaggatcccaatgggcgctttga

SEQ ID NO: 889723 - DNA, 75 bp, synthetic construct
  source 1..75: mol_type = other DNA
tgcgatcctctctttgttcgcaccagtcacggtatggttcccacactacgtgccaaagaacttgctatgccggta

SEQ ID NO: 889724 - DNA, 75 bp, synthetic construct
  source 1..75: mol_type = other DNA
ttctgctgaaaccaagtaaatttgaccccatgacggcagaactaacttataccattgtcgcaacggacttatgca

SEQ ID NO: 889725 - DNA, 75 bp, synthetic construct
  source 1..75: mol_type = other DNA
acgccagattgaagcgttaaaaacactggttgatgagattttgattgataaggccagcggtaagaatgcagacag

SEQ ID NO: 889726 - DNA, 75 bp, synthetic construct
  source 1..75: mol_type = other DNA
gaaatgtctgccggatattgtctaacgtccgttgtttatctgaaggcgttgatgtgccttcactagatgctgtgt

SEQ ID NO: 889727 - DNA, 75 bp, synthetic construct
  source 1..75: mol_type = other DNA
ctttttaacgcctatcgatccgttgctcggtaaatttatcgccgccggattaattatcgcctttatgctgctgca

SEQ ID NO: 889728 - DNA, 75 bp, synthetic construct
  source 1..75: mol_type = other DNA
tcgccgtcgggacaaccgtcggctccggtatttttgtatctgtgggtgaagtggcaaaagcagcgggcacgccgt

SEQ ID NO: 889729 - DNA, 75 bp, synthetic construct
  source 1..75: mol_type = other DNA
atgttaacgacatggtgaaccgcattgatcagcgggacattacacgccggacactggagcagtacaggagccgct

SEQ ID NO: 889730 - DNA, 75 bp, synthetic construct
  source 1..75: mol_type = other DNA
tattcctgcaatgttgctggcagctcagggaaaaaaaaatggccgccatgtttcatcagcaacgaaatccagtga

SEQ ID NO: 889731 - DNA, 75 bp, synthetic construct
  source 1..75: mol_type = other DNA
aacagaccaccagagggattaaatgatatattgcaaaatgatgatataaatatatttgataactttattttgtca

SEQ ID NO: 889732 - DNA, 75 bp, synthetic construct
  source 1..75: mol_type = other DNA
taagcagcaaagatcagaatgaatcacgccagattgaagcgttaaaaacactggttgatgagattttgattgata

SEQ ID NO: 889733 - DNA, 75 bp, synthetic construct
  source 1..75: mol_type = other DNA
ccatcaccgacagcctgaaccgccgtgaagtcctgcataccgcaggcgaaggcgggctgaagcgggtggtgaaaa

SEQ ID NO: 889734 - DNA, 75 bp, synthetic construct
  source 1..75: mol_type = other DNA
cctccgcagccgatgcggcaaccattaaagattcgctgcattacggtgtcgtggattacctgatcaaacccttct

SEQ ID NO: 889735 - DNA, 75 bp, synthetic construct
  source 1..75: mol_type = other DNA
ttgttgctcgatctccagcgtgatttcggcattgcgtatctgtttatctcccacgatatggccgtggtagagcgg

SEQ ID NO: 889736 - DNA, 75 bp, synthetic construct
  source 1..75: mol_type = other DNA
aaaacctacgcttacctggctcctgcgctgcgggcgaaaaagaaagtcattatctcgaccggctcaaaagcgttg

SEQ ID NO: 889737 - DNA, 75 bp, synthetic construct
  source 1..75: mol_type = other DNA
cgccaggccagaatacgcagtcagggatattgcagaatactggtgccagttgcagcgtgaaatggatgacaatta

SEQ ID NO: 889738 - DNA, 75 bp, synthetic construct
  source 1..75: mol_type = other DNA
gtgaatgattgtatttataagtctgctgaatattttaattccagaaaaattaataactcattaaaaataaaagta

SEQ ID NO: 889739 - DNA, 75 bp, synthetic construct
  source 1..75: mol_type = other DNA
tatgactctatcgacgcgggcgaccgctaccaggtgaaacgcatcaccgtgaaaccgggcgaaggcttgtcggta

SEQ ID NO: 889740 - DNA, 75 bp, synthetic construct
  source 1..75: mol_type = other DNA
tcgcgtggatgaagaagcgtttctggcctgcccggaagagtcggtggattacgcggtcatggaacgtacggcaga

SEQ ID NO: 889741 - DNA, 75 bp, synthetic construct
  source 1..75: mol_type = other DNA
acgtggcgctggcatgggcggtctttaaaatcttccgtattccggtgaatcagtggacgctggcgacggcggcgc

SEQ ID NO: 889742 - DNA, 75 bp, synthetic construct
  source 1..75: mol_type = other DNA
gctgagttcgttgaaaaacctaacatagatacagctcaagagtttctttcatctggtaactattattggaatagt

SEQ ID NO: 889743 - DNA, 75 bp, synthetic construct
  source 1..75: mol_type = other DNA
attatgccaaatagcattggcaaaagggtcatccgaccttgactttatacgccttgaaaagaaagcttttagtca

SEQ ID NO: 889744 - DNA, 75 bp, synthetic construct
  source 1..75: mol_type = other DNA
aagccgcattagacgagtgcgaaagcattcaactgcttgtcgcatacacaggtaatggcattaccatacaagcac

SEQ ID NO: 889745 - DNA, 75 bp, synthetic construct
  source 1..75: mol_type = other DNA
aaaggtgttttacatgcgactgcttgccgcaggaaaacccaaaaaagtggcgctggttgcctgtatacgcaagct

SEQ ID NO: 889746 - DNA, 75 bp, synthetic construct
  source 1..75: mol_type = other DNA
ctgtctcaggaagtcaccgagcgtttttatgtgtgcacggatccgggctgtggtctggtgtttaaaacgcttcag

SEQ ID NO: 889747 - DNA, 75 bp, synthetic construct
  source 1..75: mol_type = other DNA
ctggcccgtaagctacgaaaagagcttgttgagctcgatcagacctggtccggcatcgggatgacgattagcacc

SEQ ID NO: 889748 - DNA, 75 bp, synthetic construct
  source 1..75: mol_type = other DNA
caaacaaagataaatttacgcaaacaataggtgcttgccgctcttttcatggtgctattagcacaggtgcaggaa

SEQ ID NO: 889749 - DNA, 75 bp, synthetic construct
  source 1..75: mol_type = other DNA
ataagcaatgtggcttttgatggttcctccgatatcacattaaaagcaggtcatgttggtgcgtttgccttaggg

SEQ ID NO: 889750 - DNA, 75 bp, synthetic construct
  source 1..75: mol_type = other DNA
aaaccgtgatgaattaattgatacaactcaggcaaggccaattcagtattgcattaatggaacgtggtataacgc

SEQ ID NO: 889751 - DNA, 75 bp, synthetic construct
  source 1..75: mol_type = other DNA
atccagggatggagacaaagacagcaagtgattacctgccacagacaacttggccaacaactcaattaccaccag

SEQ ID NO: 889752 - DNA, 75 bp, synthetic construct
  source 1..75: mol_type = other DNA
agatctaatatcattaggtggtcatacaggacttggcgttgcgtttgctaaaaagaaaggtgaaatgttatctga

SEQ ID NO: 889753 - DNA, 75 bp, synthetic construct
  source 1..75: mol_type = other DNA
acatttctaaaggtaaaaaatgattacaacaatgtgaaaatacagtggatgcttcctgacgccagatctgggcgt

SEQ ID NO: 889754 - DNA, 75 bp, synthetic construct
  source 1..75: mol_type = other DNA
aaagggaagtttaaagaggtaaggccgcgttattctgtattgcctgatatattcacacctataaatttagggcta

SEQ ID NO: 889755 - DNA, 75 bp, synthetic construct
  source 1..75: mol_type = other DNA
gcactcgcgctggggctttcggtctttctgccctggtccgggcaggtctccctgcacggcgtgatggaggcgggc

SEQ ID NO: 889756 - DNA, 75 bp, synthetic construct
  source 1..75: mol_type = other DNA
ctgcgggcgggacagctcttgcgcagccgcagccgctgccgccgctgcgcgacgagctaaaaattcacccggcgg

SEQ ID NO: 889757 - DNA, 75 bp, synthetic construct
  source 1..75: mol_type = other DNA
gcaccgaaacgcgattcctgagcgtccagcttctgcaaaacagcatggacgcgccgaaaatcatcggatcattcc

SEQ ID NO: 889758 - DNA, 75 bp, synthetic construct
  source 1..75: mol_type = other DNA
ataaaacactatcaataagttggagtcattaccaaaaagagggtgtgatcaagctgaagccgggcgtggataaag

SEQ ID NO: 889759 - DNA, 75 bp, synthetic construct
  source 1..75: mol_type = other DNA
atcaactgcacagggaacccggaccagaatggtttctatcagcattctgtttttattacccttgatggggacaaa

SEQ ID NO: 889760 - DNA, 75 bp, synthetic construct
  source 1..75: mol_type = other DNA
ctggtggctcaggaactcgcttatggccgttatctcgataccaatatccaaagcaatttttatcactatttaatg

SEQ ID NO: 889761 - DNA, 75 bp, synthetic construct
  source 1..75: mol_type = other DNA
aacaaatcttacagaggagcaggcaggagtcgccccggaaaacgcatctggcacaaaattgggcgcagtcagaac

SEQ ID NO: 889762 - DNA, 75 bp, synthetic construct
  source 1..75: mol_type = other DNA
caatttagctgtgtaacaccagcatcacaagaggtaacaatctccactgcagccaatgcggtcgtttattatccg

SEQ ID NO: 889763 - DNA, 75 bp, synthetic construct
  source 1..75: mol_type = other DNA
ccgtcgccgttgaagtctggagcaccgaaactccggcaacagggagcgcaacacaatttagttgtgtgacaccag

SEQ ID NO: 889764 - DNA, 75 bp, synthetic construct
  source 1..75: mol_type = other DNA
cttggtgtcgttgcggggccgcgtatcgcttatttgatgctggagcggatctcgcgtgattctaacgcttgggaa

SEQ ID NO: 889765 - DNA, 75 bp, synthetic construct
  source 1..75: mol_type = other DNA
tgttgaagttgaagcagaaaacggccagaccggattcgctgtttcgacagccggtgaaatgggctgtttcgacag

SEQ ID NO: 889766 - DNA, 75 bp, synthetic construct
  source 1..75: mol_type = other DNA
gcctgttcagtttccgcatcagcgacagctactcattcagctcgtggaagttgcggttcgaagatgaggtgctct

SEQ ID NO: 889767 - DNA, 75 bp, synthetic construct
  source 1..75: mol_type = other DNA
caacaaagtggacgaataatactctaaaatattggttctccagttgtaataaacgtaatatcatcttcactttta

SEQ ID NO: 889768 - DNA, 75 bp, synthetic construct
  source 1..75: mol_type = other DNA
aaaatattggttctccagttgtaataaacgtaatatcatcttcacacttaatacaatatctgatagagatataaa

SEQ ID NO: 889769 - DNA, 75 bp, synthetic construct
  source 1..75: mol_type = other DNA
aaacgtaatatcatcttcacacttaatacaatatctgataaagatataaaattaaaaggcgttaaggatatatta

SEQ ID NO: 889770 - DNA, 75 bp, synthetic construct
  source 1..75: mol_type = other DNA
atatttatagtgtaaggcaagagcttctggattttcttaataatgatttatataaaaatgatggagagattctct

SEQ ID NO: 889771 - DNA, 75 bp, synthetic construct
  source 1..75: mol_type = other DNA
ttatgtcatctcaatcgtttttctaaattgtctgacgattttttaataaatggtccaagagaggacctttttaca

SEQ ID NO: 889772 - DNA, 75 bp, synthetic construct
  source 1..75: mol_type = other DNA
aaaatattggttctccagttctaataaacgtaatattatcttcacctttaatacaatctctgatagagatataaa

SEQ ID NO: 889773 - DNA, 75 bp, synthetic construct
  source 1..75: mol_type = other DNA
tcttccgccagaccgcacagacatggggcgcggaacgttacctgaaggatgactggcacggcctgcaactttttg

SEQ ID NO: 889774 - DNA, 75 bp, synthetic construct
  source 1..75: mol_type = other DNA
atgctgttatggagcatacatctgatgctgtcgttatacctatggatgcagggtggagcgatgttggctcttggt

SEQ ID NO: 889775 - DNA, 75 bp, synthetic construct
  source 1..75: mol_type = other DNA
gttatcaagtaaaacgtattacagtaaaacccggcgaaggtctatcagtgcaaatgcaccatcaccgtgcagagc

SEQ ID NO: 889776 - DNA, 75 bp, synthetic construct
  source 1..75: mol_type = other DNA
caggtaaagcgtattaccgttaagcctggtgaatgtctctcaacacaaatgcatcatcatcgagctgagcattgg

SEQ ID NO: 889777 - DNA, 75 bp, synthetic construct
  source 1..75: mol_type = other DNA
caaatgataaattagttacttttgggattgttcctactgcaccagaaactgggtacggttatataaaaaaaggta

SEQ ID NO: 889778 - DNA, 75 bp, synthetic construct
  source 1..75: mol_type = other DNA
catcaccgcgcggaacactgggtggtggtcgcaggaacggcaaaagtcactattgacggtgatatcaaactgctt

SEQ ID NO: 889779 - DNA, 75 bp, synthetic construct
  source 1..75: mol_type = other DNA
gaaccgatggtcatctgtaacgaagagcatcgtttcctggtggctgaacagctgcgccagctcaataagctgtcg

SEQ ID NO: 889780 - DNA, 75 bp, synthetic construct
  source 1..75: mol_type = other DNA
ctgtggtgatggattgtcaaaaacatctgagcaagagacacaagtaagttataatgtttatgtaaaacaacatat

SEQ ID NO: 889781 - DNA, 75 bp, synthetic construct
  source 1..75: mol_type = other DNA
atcaacactatcagcgccaaacctgtaccggacttgtgcagaaatcctccagcctgccttcttctgatatatatt

SEQ ID NO: 889782 - DNA, 75 bp, synthetic construct
  source 1..75: mol_type = other DNA
aatttatttcccctatattaaaagaattaaaagcattacaatctcaaccaagaataaagaaagcatctggagagg

SEQ ID NO: 889783 - DNA, 75 bp, synthetic construct
  source 1..75: mol_type = other DNA
aatacaggggcaatactttcgtgccaatccggtacgtggaagacttctggttcgctcaatggttcttaccaaact

SEQ ID NO: 889784 - DNA, 75 bp, synthetic construct
  source 1..75: mol_type = other DNA
ggccgtgcggcagaggcgagggttcgaaaaatattgcacagggataagcaggattcgcagcagaaaacccatctg

SEQ ID NO: 889785 - DNA, 75 bp, synthetic construct
  source 1..75: mol_type = other DNA
gcagccaatcagccgatgcaggatgtcagtgagctgcgtatggtctctggggttgacgctagtctttatcgaaaa

SEQ ID NO: 889786 - DNA, 75 bp, synthetic construct
  source 1..75: mol_type = other DNA
ctgtgaatcagatgaataaaattattctgaatacggtcacccgacagagcactaaagatattagttcatggaaaa

SEQ ID NO: 889787 - DNA, 75 bp, synthetic construct
  source 1..75: mol_type = other DNA
gttgccgttgctctgcaacaccggggggaacgatccggaagaactgctgaatgatacagaaaccactgccagtgc

SEQ ID NO: 889788 - DNA, 75 bp, synthetic construct
  source 1..75: mol_type = other DNA
ggatactggcggcataaaaccccatgagcgtaagcgggctgtagtgatcttacccagcaatagtggacacgcggc

SEQ ID NO: 889789 - DNA, 75 bp, synthetic construct
  source 1..75: mol_type = other DNA
ggaatgtaccaggtcggcgaaggtggcatgccggagatttaccaggccagtaccggtaagcagtacatgataccg

SEQ ID NO: 889790 - DNA, 75 bp, synthetic construct
  source 1..75: mol_type = other DNA
ctgaattgagccgccgctatggatatgatgttagcgttatttctcgtgagtgggtaagtaaaggcttagacaata

SEQ ID NO: 889791 - DNA, 75 bp, synthetic construct
  source 1..75: mol_type = other DNA
tacgtaacacggatacgaaagaacaaatagaacaagaaagattgaagaagctaaaagcagaagcggcattagccg

SEQ ID NO: 889792 - DNA, 75 bp, synthetic construct
  source 1..75: mol_type = other DNA
tggcggtattattgcgggcttcctggcgggttacattgcgaagttaatcagtacgcaactgaaactgccacagag

SEQ ID NO: 889793 - DNA, 75 bp, synthetic construct
  source 1..75: mol_type = other DNA
acccgttatgagtacagcgccgcaggagacctgacagcaacggtatcaccggacggtaaacgcagcaccatcgca

SEQ ID NO: 889794 - DNA, 75 bp, synthetic construct
  source 1..75: mol_type = other DNA
ttaaagagccgggtacgttggcagcggcgctgatgcagattggtggtggttcagcctttgcgctgatggtgccgg

SEQ ID NO: 889795 - DNA, 75 bp, synthetic construct
  source 1..75: mol_type = other DNA
gagcgtaagcgggctgtagctcacctgacactgtctgagcgcgaggagatacgagctggtgtattagctcagacc

SEQ ID NO: 889796 - DNA, 75 bp, synthetic construct
  source 1..75: mol_type = other DNA
gtgatgaagcggattgcagcgcagtggcaacacctgaacgccgaacggcatggggaaaacaatgaaaattgccat

SEQ ID NO: 889797 - DNA, 75 bp, synthetic construct
  source 1..75: mol_type = other DNA
caaagccaagaccgtttcatcgcataaaggtaatattaaacgtaagatcaaaacgcataataaacaggttatcta

SEQ ID NO: 889798 - DNA, 75 bp, synthetic construct
  source 1..75: mol_type = other DNA
tatgggccagacggccactaccgcggcggttgcagcatccaccacggcgcaggcagcaggcatcgcaaccacgac

SEQ ID NO: 889799 - DNA, 75 bp, synthetic construct
  source 1..75: mol_type = other DNA
gacaaatactacagattaattattaacttctacagaaaaataacaccgtctatgatcagggtgattgcatataaa

SEQ ID NO: 889800 - DNA, 75 bp, synthetic construct
  source 1..75: mol_type = other DNA
gcggaaaaccggtgccgtttggatcactggtacgggaaaacagtatcggaataaccagtatgtgggtgatgacgg

SEQ ID NO: 889801 - DNA, 75 bp, synthetic construct
  source 1..75: mol_type = other DNA
tgatcgtccctgctctgttagtagcaggtactgcaaacgctgcagaaatctataacaaagatggcagatctgtac

SEQ ID NO: 889802 - DNA, 75 bp, synthetic construct
  source 1..75: mol_type = other DNA
gcatgcggacatgcaggaattggtggtgggataaatgcggctatcacatattctgagaccaagtctttacctaca

SEQ ID NO: 889803 - DNA, 75 bp, synthetic construct
  source 1..75: mol_type = other DNA
aataatgaagttattgtgagtagaacctttaatctctacacgggggcgactccgaatgatgacgaaaagaaacag

SEQ ID NO: 889804 - DNA, 75 bp, synthetic construct
  source 1..75: mol_type = other DNA
atggttgctaaattaaaaccagatgttctttttaatactaatccttttttagaagcaatgaataaggagagactt

SEQ ID NO: 889805 - DNA, 75 bp, synthetic construct
  source 1..75: mol_type = other DNA
catgatccccggcgataacggtcgcgtcatcagtaaccgggatattggcgggggtggcggggcgttcaattacag

SEQ ID NO: 889806 - DNA, 75 bp, synthetic construct
  source 1..75: mol_type = other DNA
aaagagagcaacaaagagggcaagacctccgcctcgcaggctgaatccattgctcagaaactggcgagcctcaaa

SEQ ID NO: 889807 - DNA, 75 bp, synthetic construct
  source 1..75: mol_type = other DNA
attacgacatcgaggccgatgtatctggcttgctcaaggcccagggaaaggccaataagtcgctcgactccatcg

SEQ ID NO: 889808 - DNA, 75 bp, synthetic construct
  source 1..75: mol_type = other DNA
atcattccgctagtttccagtctggtggtgggtctggcgatgatctacctgatcggtaaaccggttgctggcatc

SEQ ID NO: 889809 - DNA, 75 bp, synthetic construct
  source 1..75: mol_type = other DNA
tttattatcagtttacaatccaccaaaatcaataaaggctttgacagagcgacttagtgcggattcaggttataa

SEQ ID NO: 889810 - DNA, 75 bp, synthetic construct
  source 1..75: mol_type = other DNA
cggggaaaggggctacgagcaattacccatgcggcagtcagtgtcggactacttgagttttgccaagaaaatggg

SEQ ID NO: 889811 - DNA, 75 bp, synthetic construct
  source 1..75: mol_type = other DNA
ttttttggaaaaaaagtgattttattactctatggagagcaatatgttaattcttatgggataataatcatattg

SEQ ID NO: 889812 - DNA, 75 bp, synthetic construct
  source 1..75: mol_type = other DNA
aaaaatctcctcgaaatggctatgcaaatggtttatggcaaagatatggtgacaaagtccggggatatattgatt

SEQ ID NO: 889813 - DNA, 75 bp, synthetic construct
  source 1..75: mol_type = other DNA
gtgaactcgcgccgctgaacaaactggcgctggcactacgtatgcgtgacccagactcggaaaaaccactaaacg

SEQ ID NO: 889814 - DNA, 75 bp, synthetic construct
  source 1..75: mol_type = other DNA
gactggccccgtatggcgcattaacgattatatgtcactgtatgcggctggcggcgtggcgcatgttaaagctga

SEQ ID NO: 889815 - DNA, 75 bp, synthetic construct
  source 1..75: mol_type = other DNA
tcaaaaattttaaatcatacaaagagcaatcttttgatttgtcaggtctaaatgtattttgtggtaataactctg

SEQ ID NO: 889816 - DNA, 75 bp, synthetic construct
  source 1..75: mol_type = other DNA
aaacagatattgattcagttcaaccagttcagccagttcagccagttcagccagttcagccagttcagccagttc

SEQ ID NO: 889817 - DNA, 75 bp, synthetic construct
  source 1..75: mol_type = other DNA
taattttctgatggataaagatgcgcaggggtatatcgacctgtctgattttgatttaacaaattgtcattttaa

SEQ ID NO: 889818 - DNA, 75 bp, synthetic construct
  source 1..75: mol_type = other DNA
ctgcagagaactgttgtttctcaaaagggaagaagttaaacgcagaacgggaaaatgggttgactggaaagagct

SEQ ID NO: 889819 - DNA, 75 bp, synthetic construct
  source 1..75: mol_type = other DNA
gaccggccccgtatggcgcattaacgattacatgtcactgtatgcggctggcggcgtggcgcatgttaaagctga

SEQ ID NO: 889820 - DNA, 75 bp, synthetic construct
  source 1..75: mol_type = other DNA
ctgttcgcccgcacacatgcgatgatggttcgtgaacgacgctttacctccgacgcagctcacgaacttcgtagc

SEQ ID NO: 889821 - DNA, 75 bp, synthetic construct
  source 1..75: mol_type = other DNA
ggagctggcggtagatgaccgtttgggctacttcgttaatcacgatatggcggggtatgaggtgccggtccatgc

SEQ ID NO: 889822 - DNA, 75 bp, synthetic construct
  source 1..75: mol_type = other DNA
ctggcctgtagccggtgtgatgtcatcgttcaggcaccacttccccctaaaccaattgaacgcggttatgccagt

SEQ ID NO: 889823 - DNA, 75 bp, synthetic construct
  source 1..75: mol_type = other DNA
agctacttcgtaaggaaagtccccagccgatgacgttcaagattactcacggtaagggacgtaaaggcatcatca

SEQ ID NO: 889824 - DNA, 75 bp, synthetic construct
  source 1..75: mol_type = other DNA
ctgtatcgttggtggggcgctgactggcgcaatctcaatggcgattggtgcgaaactgatggcaccgcacggtgg

SEQ ID NO: 889825 - DNA, 75 bp, synthetic construct
  source 1..75: mol_type = other DNA
cgccaggtgcactgactttatgcgtcattacagccttaataattacgctgcttgccagcttgggcggcaggcttg

SEQ ID NO: 889826 - DNA, 75 bp, synthetic construct
  source 1..75: mol_type = other DNA
ggcgaaagatggtgatggagcatgaagcttatcaagtactggagcttgtactggagcatgccagtacggtgatag

SEQ ID NO: 889827 - DNA, 75 bp, synthetic construct
  source 1..75: mol_type = other DNA
atcctggtattcctgtttttggatataaaggagcttccattcatatccagggaatgctcagggaaatgctgaacg

SEQ ID NO: 889828 - DNA, 75 bp, synthetic construct
  source 1..75: mol_type = other DNA
ttgtttggaaagcgcattatatttattttatacgggaatgattatttggctgcctaccacatacttgttatttta

SEQ ID NO: 889829 - DNA, 75 bp, synthetic construct
  source 1..75: mol_type = other DNA
gtatgatattaatcatcttattaatgaaattctacagtcaccatattcgagtaatttgaatgaacgaaaatcaaa

SEQ ID NO: 889830 - DNA, 75 bp, synthetic construct
  source 1..75: mol_type = other DNA
aaatcaaggataaaaccattatttttgattgtcattgcgtatataaaaaggaaaattcactcaaaaaatgatcat

SEQ ID NO: 889831 - DNA, 75 bp, synthetic construct
  source 1..75: mol_type = other DNA
gaacgcggttatgccagtgcagggttacttgcacggatcctggtcagcaaatatatggaacatatccctttatat

SEQ ID NO: 889832 - DNA, 75 bp, synthetic construct
  source 1..75: mol_type = other DNA
ttttaaacttcaaatggttaaactgtcttcacaaccaagattctctgttacccgtattgtccgggaacacgatat

SEQ ID NO: 889833 - DNA, 75 bp, synthetic construct
  source 1..75: mol_type = other DNA
atcccgaatgacagcgcgctgaacggtaaaaatgtctggctgggcgatatttcccgggcagttgcgcaccctgag

SEQ ID NO: 889834 - DNA, 75 bp, synthetic construct
  source 1..75: mol_type = other DNA
tggttctgttggcgcgggtaatgcaatcactcccgaagaagtagccgcagcggatctggtgattgtggcggcaga

SEQ ID NO: 889835 - DNA, 75 bp, synthetic construct
  source 1..75: mol_type = other DNA
gaaaaactacccacaagcggcgtcattatggttacacatcaacccggtgtctggaacctggctgatgatatttgt

SEQ ID NO: 889836 - DNA, 75 bp, synthetic construct
  source 1..75: mol_type = other DNA
gtcgattttcagcgctcacgtcgctacagggaacatctggtgctgaatatcttcgttcccgtggcatattcagtc

SEQ ID NO: 889837 - DNA, 75 bp, synthetic construct
  source 1..75: mol_type = other DNA
acagtgttcaggattaccggcatgatgaagtgaaaccggggtatgtgaaggagaccaccaccgccagtgatggcc

SEQ ID NO: 889838 - DNA, 75 bp, synthetic construct
  source 1..75: mol_type = other DNA
attggtgctggtgcagcttataatgaatcgccttatcgcggttataatgaaaatacaaaggcaattccgctgatt

SEQ ID NO: 889839 - DNA, 75 bp, synthetic construct
  source 1..75: mol_type = other DNA
gatattactcacagattcaattcttcatatgacatcaatgaaaaagcacgacttatcaatgaattaaaaatggag

SEQ ID NO: 889840 - DNA, 75 bp, synthetic construct
  source 1..75: mol_type = other DNA
tacgatatgatcttaacaaatatgccctttctttacgcaaaaccgcaacacttgcttcaacattttttattgagt

SEQ ID NO: 889841 - DNA, 75 bp, synthetic construct
  source 1..75: mol_type = other DNA
tattggtgatagtgtgttgttggtcatggtactgccctgtaaagcaatgcgccgtagtacctcacaccacggcgc

SEQ ID NO: 889842 - DNA, 75 bp, synthetic construct
  source 1..75: mol_type = other DNA
catcctggcgggcgattcttacgggactttagccgccgtgggcagcttgctaaaaatgcctccaacgcgaatagt

SEQ ID NO: 889843 - DNA, 75 bp, synthetic construct
  source 1..75: mol_type = other DNA
aagaaattggattactttacaataatctcattattattctattttagaaatagaaaaccttatcaagaacttaaa

SEQ ID NO: 889844 - DNA, 75 bp, synthetic construct
  source 1..75: mol_type = other DNA
ttcctgctgaggcgatccggttcaatgccaggcagagacacaacgggagtgtgttccagtctctttattcacttg

SEQ ID NO: 889845 - DNA, 75 bp, synthetic construct
  source 1..75: mol_type = other DNA
gccagtgggccatgattttcaagcattaccgcctgccaccaattacaggaaaaaatcacttcaaaggtaagtgtc

SEQ ID NO: 889846 - DNA, 75 bp, synthetic construct
  source 1..75: mol_type = other DNA
cgcaacacatgcagggcgtctaaccaccaacgatagagaaagtatcgaggtagctatgagaaataataccacaca

SEQ ID NO: 889847 - DNA, 75 bp, synthetic construct
  source 1..75: mol_type = other DNA
agtttcttctttagtaataatttcagttatcccatttaataaagaattatcattatggttatttaatgataattc

SEQ ID NO: 889848 - DNA, 75 bp, synthetic construct
  source 1..75: mol_type = other DNA
ctattcgctacccacgtaaggtcgctaactctttctttttatatgaaaataatgctttggaaaaatataaagggg

SEQ ID NO: 889849 - DNA, 75 bp, synthetic construct
  source 1..75: mol_type = other DNA
cccggaaagcaggttattgaagatccacttcctctccctgtgcgactgccgggcatatgttgcagtactgcgcat

SEQ ID NO: 889850 - DNA, 75 bp, synthetic construct
  source 1..75: mol_type = other DNA
atgttaaaacaccagacacaccgatgtgtgtgtaatcgggaagaacaacaacccattaattccacattctctgga

SEQ ID NO: 889851 - DNA, 75 bp, synthetic construct
  source 1..75: mol_type = other DNA
tcgtgacgcttattcgtcgttattccatcagcatcctgcaccttgatgctttcggcgaactcctgccaggatttg

SEQ ID NO: 889852 - DNA, 75 bp, synthetic construct
  source 1..75: mol_type = other DNA
tgacagaaacacgttataaaggtttaaacgagagagctgatgaacttatccaggcactcatcgataagattggag

SEQ ID NO: 889853 - DNA, 75 bp, synthetic construct
  source 1..75: mol_type = other DNA
taaaggtacttcagaaattgctaaggtcgccgaccttatcgtccagccaacgggggcctcccttgacgatcttgt

SEQ ID NO: 889854 - DNA, 75 bp, synthetic construct
  source 1..75: mol_type = other DNA
agacacaatcaatacttaatcagattaataacattagatacgaaaagaataaaaactctgaatctaaaatcattg

SEQ ID NO: 889855 - DNA, 75 bp, synthetic construct
  source 1..75: mol_type = other DNA
taacgttatccgttttctctaccctttaacaatcccggatgctcagttcagcaaagcgctgaatattctgacccg

SEQ ID NO: 889856 - DNA, 75 bp, synthetic construct
  source 1..75: mol_type = other DNA
acagaatataaagggaatataggtgatactcagaacagcatacgtggcgaggaaaatattgtaagaggacagtat

SEQ ID NO: 889857 - DNA, 75 bp, synthetic construct
  source 1..75: mol_type = other DNA
atacgcaccttatttaaagagatcgctacctgatgaaaaaactataaattatggggtggaaatagaaacaccaac

SEQ ID NO: 889858 - DNA, 75 bp, synthetic construct
  source 1..75: mol_type = other DNA
atatcagcaagaattccaaaaacaatgttataagcaagttaaagcctttacgacactctctcgatacaataaaat

SEQ ID NO: 889859 - DNA, 75 bp, synthetic construct
  source 1..75: mol_type = other DNA
tcaaacatgggcagaaatgtctgaatatcaattcgaaatatttcaacacgatacgtttcatcctaaaaaatgtca

SEQ ID NO: 889860 - DNA, 75 bp, synthetic construct
  source 1..75: mol_type = other DNA
tacaatatgacaaaatgctctatctgattgaagacagcgaatacagtagaagggctatcggcaagtatattgatg

SEQ ID NO: 889861 - DNA, 75 bp, synthetic construct
  source 1..75: mol_type = other DNA
aagcctaatgaatgtttggctaaaaaatatttagaatctgggaaatactattggaatagtggtatattcatgttt

SEQ ID NO: 889862 - DNA, 75 bp, synthetic construct
  source 1..75: mol_type = other DNA
cgtaactgcaccctgttcgacaaaacccgcaagtgggcataccgtgctatccgtcagggctggcctgagtatgag

SEQ ID NO: 889863 - DNA, 75 bp, synthetic construct
  source 1..75: mol_type = other DNA
ctgccgccgtggagaacgcgctgcgtaaaaaattagaggctgacgcggggtattcggggttaatctgcaaaaatc

SEQ ID NO: 889864 - DNA, 75 bp, synthetic construct
  source 1..75: mol_type = other DNA
acctttccagcctggcaatgcctgatgccattcaggtcccggatgcaaaagcgctgtttacgacctggctggcgc

SEQ ID NO: 889865 - DNA, 75 bp, synthetic construct
  source 1..75: mol_type = other DNA
attcatcaagacatatgatggtagcggtagtaagcgcatcaaaataaaccgcaacagggcaaagggaacatgtaa

SEQ ID NO: 889866 - DNA, 75 bp, synthetic construct
  source 1..75: mol_type = other DNA
attgatggagagttcaacgatgctgctgtatccgctgcattagactctgaatctcctagcgttaaacttggtggc

SEQ ID NO: 889867 - DNA, 75 bp, synthetic construct
  source 1..75: mol_type = other DNA
acgattttgttttttttggggttgaaatttccaatcatcaagaaaaactcccactaaataaaacacatcatactg

SEQ ID NO: 889868 - DNA, 75 bp, synthetic construct
  source 1..75: mol_type = other DNA
gaaggttgtagaagcgtggggctttcgtctggtgacgatgaaaggattaacctggaacaaatgcgggaaaagaca

SEQ ID NO: 889869 - DNA, 75 bp, synthetic construct
  source 1..75: mol_type = other DNA
atatgaaaaaattttccttttgttatattatttctgttttcactccctctgattatttttaccaaccctgggtca

SEQ ID NO: 889870 - DNA, 75 bp, synthetic construct
  source 1..75: mol_type = other DNA
ggtcgatcgtgttgccggggaaatgaacctgagcaaaacgcaactgcgatccgctttacgtctctacacttcgag

SEQ ID NO: 889871 - DNA, 75 bp, synthetic construct
  source 1..75: mol_type = other DNA
gctgaagcaacgccgtatgaaccggcgggcaaagctcaaacggcgaccactgaaggtaagaaagagagtgcaggc

SEQ ID NO: 889872 - DNA, 75 bp, synthetic construct
  source 1..75: mol_type = other DNA
tgatgatgcggtattctttcctgtaccaagaagtgagatcaatgcttgtaaaaaaatggcgattgattactggca

SEQ ID NO: 889873 - DNA, 75 bp, synthetic construct
  source 1..75: mol_type = other DNA
ggcgaaggtgaataccgaggctgagccccacctggccacgcagttcggtatccgcagcatcccgacgctcgccct

SEQ ID NO: 889874 - DNA, 63 bp, synthetic construct
  source 1..63: mol_type = other DNA
atgacgttgtctccttatttgcaagaggtggcgaagcgccgcacttttgccattatttctcac

SEQ ID NO: 889875 - DNA, 75 bp, synthetic construct
  source 1..75: mol_type = other DNA
gtaaaaatgaaaatattatattgcaacaagaaaatcaagttttcttgactctttcagttgaaagtgtcaaaaaaa

SEQ ID NO: 889876 - DNA, 75 bp, synthetic construct
  source 1..75: mol_type = other DNA
ttcaattttgaacatggaaataaaccagctaccgcttttcttttcaggcttattgcgcaacttcaatttagtggc

SEQ ID NO: 889877 - DNA, 75 bp, synthetic construct
  source 1..75: mol_type = other DNA
tattctgattctttggccttgcgacgctggcggtattcaacttcccgctttaatgcagctgtaacaaactgccct

SEQ ID NO: 889878 - DNA, 75 bp, synthetic construct
  source 1..75: mol_type = other DNA
atgaacaggaaaggcaggcacgcctggaacgggagcgtgcgcggtcctggcatgaagagcaggaacgggaagtac

SEQ ID NO: 889879 - DNA, 75 bp, synthetic construct
  source 1..75: mol_type = other DNA
atggttataaaagagcatagcttactctttatacacacacaaacgccccggaaacggaataatccgtttcatagt

SEQ ID NO: 889880 - DNA, 75 bp, synthetic construct
  source 1..75: mol_type = other DNA
tgacagacaaatgagttacatgcgccagcaggtctctgcccgcatgatgacccgctaccagaataactatcattt

SEQ ID NO: 889881 - DNA, 75 bp, synthetic construct
  source 1..75: mol_type = other DNA
atgtttatgctttttctgaagacgcatatctcagggttgatggctatgataaaaaaataatttttacagatagca

SEQ ID NO: 889882 - DNA, 75 bp, synthetic construct
  source 1..75: mol_type = other DNA
tagctatgcgcaacgccaaatttacgcaaggcaggctggccaaagaagtaggtatggcccagtcaagcgtcaatc

SEQ ID NO: 889883 - DNA, 75 bp, synthetic construct
  source 1..75: mol_type = other DNA
ttcaattttgaaccaggaaataagccagctactgcttttcttttcaggcttattgcacagcttcaatttagtggc

SEQ ID NO: 889884 - DNA, 75 bp, synthetic construct
  source 1..75: mol_type = other DNA
tcacgcgcggtcactacgaggctgtggccgacatcgccaccggcttcaaactgggagatcgtcttaccattcgcc

SEQ ID NO: 889885 - DNA, 75 bp, synthetic construct
  source 1..75: mol_type = other DNA
cgacaatggatatgatcatggaaaacctcaatcaggcgagtgtccagattgccgcttttcagtcccgtgttcagg

SEQ ID NO: 889886 - DNA, 75 bp, synthetic construct
  source 1..75: mol_type = other DNA
atggctaagacagcaaatcaacttattaaacaggcgtacgaaatagcccaaactatgccaccagcacaggcagca

SEQ ID NO: 889887 - DNA, 75 bp, synthetic construct
  source 1..75: mol_type = other DNA
aacgggattggtggagcaagctgacggaggttatttacttctggatgaagtgcatcgcctcccgtacgaaggaca

SEQ ID NO: 889888 - DNA, 75 bp, synthetic construct
  source 1..75: mol_type = other DNA
atgcggtagaaaaaggccgcgcagcggtgctttatccccacggactacatgtgctgttaaccggtgcatctggtg

SEQ ID NO: 889889 - DNA, 75 bp, synthetic construct
  source 1..75: mol_type = other DNA
gtaaaatttatccaccgtaaagagtcactgatggctgttcgcgaacaaatggttcgctttcctgtggattttcct

SEQ ID NO: 889890 - DNA, 75 bp, synthetic construct
  source 1..75: mol_type = other DNA
ggttgtgcaggcactagaagcgaccggagagatcaacggcaaacttatctggagtaataccggttatttgatcaa

SEQ ID NO: 889891 - DNA, 75 bp, synthetic construct
  source 1..75: mol_type = other DNA
acgatgaagagctaaacgaaatgttcgttagattgttagcattaactgagaagattatctcatctattaaaaatg

SEQ ID NO: 889892 - DNA, 75 bp, synthetic construct
  source 1..75: mol_type = other DNA
taagaaaaatgcgcatagacttggggcttacgcttaaaagcatggctgaggctatgggcatgacctcgtcttatc

SEQ ID NO: 889893 - DNA, 75 bp, synthetic construct
  source 1..75: mol_type = other DNA
accgtcacaatcactgtcggctctggcggaacaggtcaaaatacgtcagccagtaacggacgtcagggaggaacc

SEQ ID NO: 889894 - DNA, 75 bp, synthetic construct
  source 1..75: mol_type = other DNA
cagctgcgctttccgttacggggtatggtgcaattcatcctattcctgaaaaaagtaaagttatcgagtttatta

SEQ ID NO: 889895 - DNA, 75 bp, synthetic construct
  source 1..75: mol_type = other DNA
cgtgggcgtcgggaatgaccgagcgtaatgatacgctagagttagatacctcaactctattcatccagcctgatt

SEQ ID NO: 889896 - DNA, 75 bp, synthetic construct
  source 1..75: mol_type = other DNA
cacgtttgataactgtaagcgtgcagcaagaaccgtattgacggggatgtgttattcagtcggcagtgctacgcg

SEQ ID NO: 889897 - DNA, 75 bp, synthetic construct
  source 1..75: mol_type = other DNA
gtgatggcggacaacggtgcagcggtcgcttcgacgatgaccacaaagccggacggcacggtggagatcagtgtc

SEQ ID NO: 889898 - DNA, 75 bp, synthetic construct
  source 1..75: mol_type = other DNA
accagccataccgtctgccggggcagcagcatgatgaggaatcagggctgtactataaccggaaccggtactatg

SEQ ID NO: 889899 - DNA, 75 bp, synthetic construct
  source 1..75: mol_type = other DNA
ggctcgtgcggaacgcctggaacgctggaaagggcgggcggggacggtccttaaaaccggttttgggctttcggt

SEQ ID NO: 889900 - DNA, 75 bp, synthetic construct
  source 1..75: mol_type = other DNA
ccgcgttacttttgatctgtgctggtatcgcaattcgctctctcccttcgccttacttattatttggcggtacag

SEQ ID NO: 889901 - DNA, 75 bp, synthetic construct
  source 1..75: mol_type = other DNA
gttgtaccctcaacgttaggcgctaccgctggcatgggtgctggtgaattactttcagccgcctactacaacggc

SEQ ID NO: 889902 - DNA, 75 bp, synthetic construct
  source 1..75: mol_type = other DNA
cctgacgaaacaggttgtacaggcttataaagacacccgcggttatctcccctggaatcatgacgataaaaagtt

SEQ ID NO: 889903 - DNA, 75 bp, synthetic construct
  source 1..75: mol_type = other DNA
aggcatttatccttgatgatgccctgccggcgttgatcgatttgtccgagtggatgtggaaattcggaaaagttc

SEQ ID NO: 889904 - DNA, 75 bp, synthetic construct
  source 1..75: mol_type = other DNA
aggcgataaaagagaaatcccgcacctacattgacggacttcctgcggctggtcagggacaggaaaatcctgatc

SEQ ID NO: 889905 - DNA, 75 bp, synthetic construct
  source 1..75: mol_type = other DNA
agaaaaagacaaaatttactgttttcgttttatttattacatgtctttttcttgtaaaaatcaagaataaagtta

SEQ ID NO: 889906 - DNA, 75 bp, synthetic construct
  source 1..75: mol_type = other DNA
atggattttcacttggatattttgctccctacacgattcgctccagaggaactagatctacaagaggttatggtt

SEQ ID NO: 889907 - DNA, 75 bp, synthetic construct
  source 1..75: mol_type = other DNA
acaggcctcaactggaggtcgtggagcatcgcgtggcagataccgaagatggtttcatgcgcgttgctaacgaga

SEQ ID NO: 889908 - DNA, 75 bp, synthetic construct
  source 1..75: mol_type = other DNA
cctgtaatggtatttgtaaagacaagtataggcggtgttacagcaagcgttagcagggctaactctggacaaata

SEQ ID NO: 889909 - DNA, 75 bp, synthetic construct
  source 1..75: mol_type = other DNA
atgaaagcgccttaaactctacctcttcagtagtgaatgaaaaaaaattatccaaacaacaatatgatcatactg

SEQ ID NO: 889910 - DNA, 75 bp, synthetic construct
  source 1..75: mol_type = other DNA
tgatggatgcgatcaaaaaaccgtgtgttttgagattaaagctaattaaaaacaaaaaggcaggaaaggctttat

SEQ ID NO: 889911 - DNA, 75 bp, synthetic construct
  source 1..75: mol_type = other DNA
attgatcccaccgatctccagcgtacgctggcaatctatccgattttatgcatggatccagcggtcagcccttgt

SEQ ID NO: 889912 - DNA, 75 bp, synthetic construct
  source 1..75: mol_type = other DNA
atttttcgtgttggtatctgtgttggtataggatggtgttgtttattattaacaattttaaatcatgaggttaaa

SEQ ID NO: 889913 - DNA, 75 bp, synthetic construct
  source 1..75: mol_type = other DNA
atggcctatcgttccgcaccgctctatgaagatgttatctggcgaacgcatctccagccgcaggatgctgggctt

SEQ ID NO: 889914 - DNA, 75 bp, synthetic construct
  source 1..75: mol_type = other DNA
cacccgaatggcaatatctgttggacttgatcgcgaaggtgcgacagaaacttacagcaatatttgccgttttat

SEQ ID NO: 889915 - DNA, 75 bp, synthetic construct
  source 1..75: mol_type = other DNA
aaaaagaatgggcaaatgaagtccattgacaacaaatcatctctccaggttgacaggaattcctctctttctttg

SEQ ID NO: 889916 - DNA, 75 bp, synthetic construct
  source 1..75: mol_type = other DNA
atgacccggtactgccatctcccctgcgccagtcttcagcccgtaaaccgttacctgcctcacttccccgtgaaa

SEQ ID NO: 889917 - DNA, 75 bp, synthetic construct
  source 1..75: mol_type = other DNA
tatgccggagcggggcttctggcccatgttgtcgctggaaaatatgcaggctatctgccgttataccgccagtca

SEQ ID NO: 889918 - DNA, 75 bp, synthetic construct
  source 1..75: mol_type = other DNA
cgtcggatgtggttattccggtgtgcggtttggtgatgctgcaggtcaggacacccggcagtgggtgaaggtgaa

SEQ ID NO: 889919 - DNA, 75 bp, synthetic construct
  source 1..75: mol_type = other DNA
aggagcgccagcgtcgtcagcggcatgaccagcttttttcatgcggtgtttcctgcaaacagcgaaagacggagg

SEQ ID NO: 889920 - DNA, 75 bp, synthetic construct
  source 1..75: mol_type = other DNA
gtgtggatcactattgcaccgttcgtgacacttgccatggaagcgttaaaacagggcaaaagtttgcagcgggca

SEQ ID NO: 889921 - DNA, 75 bp, synthetic construct
  source 1..75: mol_type = other DNA
tttttgtctcgatgttacatatcgggattattgaattgcgacgctgtcagtcagaaaattgccagcaagaattga

SEQ ID NO: 889922 - DNA, 75 bp, synthetic construct
  source 1..75: mol_type = other DNA
caggatattattgctgaccatcagggacatcaggccattattgagcaaagaacgcaggacagtaatatccgtaat

SEQ ID NO: 889923 - DNA, 75 bp, synthetic construct
  source 1..75: mol_type = other DNA
accatgtggtggtgcgctctggcttcgcacaattactctctctggaagacgatctggaggtcattggtcagtaca

SEQ ID NO: 889924 - DNA, 75 bp, synthetic construct
  source 1..75: mol_type = other DNA
acaaccagtaaacctggcgctccttttattacctctacgctgcaacaagctgccagcacccgtcttggatttggc

SEQ ID NO: 889925 - DNA, 75 bp, synthetic construct
  source 1..75: mol_type = other DNA
ctgcacggcgtgccgaagattctgtttactgacccgggctctgcacttgtttcagcctccctgctcaacatgtgc

SEQ ID NO: 889926 - DNA, 75 bp, synthetic construct
  source 1..75: mol_type = other DNA
atgagcaaaccacgcaaacagcgatctgatgcaggtaaaacgacactgactcacgatgaaatgctgactatttct

SEQ ID NO: 889927 - DNA, 75 bp, synthetic construct
  source 1..75: mol_type = other DNA
ttgatctggagcaaaaggtttggcatctccccaaagagcgcaccaaaaagcacaagtctatcgacattccactca

SEQ ID NO: 889928 - DNA, 75 bp, synthetic construct
  source 1..75: mol_type = other DNA
tacgggtaaactggtgctcggatttggtatatcttcgtttaaaagcacaccagtttggattaacacttttcgcca

SEQ ID NO: 889929 - DNA, 75 bp, synthetic construct
  source 1..75: mol_type = other DNA
tttaacgccacggctgttcacagccgccacggtaaaacccgcacggatatctggctgaagattactgctgagcag

SEQ ID NO: 889930 - DNA, 75 bp, synthetic construct
  source 1..75: mol_type = other DNA
gcaatatacgacgctgcctgtgctgaacttggcatgtcccgcgccactctgctgcgcaggctgaaggaggtctct

SEQ ID NO: 889931 - DNA, 75 bp, synthetic construct
  source 1..75: mol_type = other DNA
tgcttaggttcatctaatgtaaggctggctactttaaaaagaattcgtactggtgatataatcatagttcagaaa

SEQ ID NO: 889932 - DNA, 75 bp, synthetic construct
  source 1..75: mol_type = other DNA
agtcttggtataaaaaaatagcgttattagacaataaagaacattcggcagaaaaacatgtgccggacaacagcg

SEQ ID NO: 889933 - DNA, 75 bp, synthetic construct
  source 1..75: mol_type = other DNA
tgatgccggtaaatctggacgcgtagaactggataccctttgcaactacgtctggccggacgaaactaagaaccc

SEQ ID NO: 889934 - DNA, 75 bp, synthetic construct
  source 1..75: mol_type = other DNA
catcagagctggattaaggaccagataattccgtccaccgcgtctgatgatgaaaccattatcaaaacagcaacg

SEQ ID NO: 889935 - DNA, 75 bp, synthetic construct
  source 1..75: mol_type = other DNA
acgccctgaggatattgcaggaaaaataaagaaatcggtattaaaagcaatcgaacaatctcacgaagttaatcg

SEQ ID NO: 889936 - DNA, 75 bp, synthetic construct
  source 1..75: mol_type = other DNA
acggccagaggatatttcaggaaaaataaaaaagtctgttttaaaagctatcgagcaagctcatgaagttaacag

SEQ ID NO: 889937 - DNA, 75 bp, synthetic construct
  source 1..75: mol_type = other DNA
tacaaacagtcatattataaaaggggagaaatccaaaaaacacctgtatatcatctatgaatttatgaaagagct

SEQ ID NO: 889938 - DNA, 75 bp, synthetic construct
  source 1..75: mol_type = other DNA
caccggtatgtcgccttatcacatatttatcactctttaataaactgctcatcgctttttgatatgaacgtgaga

SEQ ID NO: 889939 - DNA, 75 bp, synthetic construct
  source 1..75: mol_type = other DNA
tgagcggtggccctgcgctgtattcgctggacgatatctcttaccgctgtttgcgctacgggatgaaagtgctgg

SEQ ID NO: 889940 - DNA, 75 bp, synthetic construct
  source 1..75: mol_type = other DNA
agcttacaggtcatcagatgccagggatgcaacgagtctataaccactcccgttatctcgatgcgaaacgtgatg

SEQ ID NO: 889941 - DNA, 75 bp, synthetic construct
  source 1..75: mol_type = other DNA
taaaggactgacagcacctgttatgttaaatggtgggcgtattcgggtacagagccagacatgtaccatggggca

SEQ ID NO: 889942 - DNA, 75 bp, synthetic construct
  source 1..75: mol_type = other DNA
gccactgaaacgcaatggcttaaagattctccctcacagccattgcaacagtcactgaaagaccttgagcgggct

SEQ ID NO: 889943 - DNA, 75 bp, synthetic construct
  source 1..75: mol_type = other DNA
taaacaggctgacgacgatgcgcgattcggtgacgtgcacgaagccgtgaccgccatcgccgtgcaggtgcagac

SEQ ID NO: 889944 - DNA, 75 bp, synthetic construct
  source 1..75: mol_type = other DNA
catgggcatggcgcaggcactcggtgtgcgttttctcgatgctgatggtctggtgctggcggcaaatggcggtaa

SEQ ID NO: 889945 - DNA, 75 bp, synthetic construct
  source 1..75: mol_type = other DNA
cgcctgctggtcgctgtctgccggggccaatccgagtttcattgccagccaaatggggcactccagcgcccagat

SEQ ID NO: 889946 - DNA, 75 bp, synthetic construct
  source 1..75: mol_type = other DNA
aacactattctgattcaaaacaaagctgctaaacagattcgtgaatcaggtaacgtaatttcccttgttgatttt

SEQ ID NO: 889947 - DNA, 75 bp, synthetic construct
  source 1..75: mol_type = other DNA
aaggcaaggctggtgctgacgaaggacggacaaatttttctcaacggcacaaaaattcatttgcagggtaaggag

SEQ ID NO: 889948 - DNA, 75 bp, synthetic construct
  source 1..75: mol_type = other DNA
aacttttggctagctacggcaatgactcagaatttcgctcggtagctgaaagaattattagtgaagaagaaaaaa

SEQ ID NO: 889949 - DNA, 75 bp, synthetic construct
  source 1..75: mol_type = other DNA
tcgaaggtgggattaaccgtttctatggcggttatcgtaccaatgatggcaccgaaatcatgctcagtctgcgtc

SEQ ID NO: 889950 - DNA, 75 bp, synthetic construct
  source 1..75: mol_type = other DNA
acaaacaaatcgaaggtttattttcaacattattaaccattaatgacaaccttttacgagcaaaagcggaaattg

SEQ ID NO: 889951 - DNA, 75 bp, synthetic construct
  source 1..75: mol_type = other DNA
ggtccgtgtactcgacaggatcgcggcaaatcgcggctatccgtcatgctacgcatggataatggttcggaattt

SEQ ID NO: 889952 - DNA, 75 bp, synthetic construct
  source 1..75: mol_type = other DNA
gccagcagctggatcggcccccgcgcaaaacgcgctaaaggccaggcctcctcgctgtatctgttcagttactat

SEQ ID NO: 889953 - DNA, 75 bp, synthetic construct
  source 1..75: mol_type = other DNA
cgttgcttcgcacatggaggcgattaaccactgtctgctcacccgcgccgagctgcgtgaattcacccttgagca

SEQ ID NO: 889954 - DNA, 75 bp, synthetic construct
  source 1..75: mol_type = other DNA
ccaccctcatgctggaatacgccggaaagaaattccttatcgacccgatgctggcagaaaaagacgcctgggatg

SEQ ID NO: 889955 - DNA, 75 bp, synthetic construct
  source 1..75: mol_type = other DNA
aaatcgtgacgcatgaagtctgtgggccgatgggcgaaaaagtgaatgctttttatggcattactggggatggga

SEQ ID NO: 889956 - DNA, 75 bp, synthetic construct
  source 1..75: mol_type = other DNA
ctcgctactctcagctggaaaaaattctttctgctgccgatgatcccctgctggcggatgcccatatttttcccc

SEQ ID NO: 889957 - DNA, 75 bp, synthetic construct
  source 1..75: mol_type = other DNA
tggagcagcttacaggccaccagatgccaggaatgcagcgagtttataatcattcccgttatctggatgcgaaac

SEQ ID NO: 889958 - DNA, 75 bp, synthetic construct
  source 1..75: mol_type = other DNA
ttacaacgatgctgagcgatttaggcgtggatcctcacgtcgtggagcagcttacaggccaccagatgccaggaa

SEQ ID NO: 889959 - DNA, 75 bp, synthetic construct
  source 1..75: mol_type = other DNA
aaaatgtgcggcgcgatgaaaggcgcggtcaccggagcgctggtgttcgaaggactggcgaaagatctcgacgag

SEQ ID NO: 889960 - DNA, 75 bp, synthetic construct
  source 1..75: mol_type = other DNA
tttgatcaggcgattaacgtggtgccgggcatgacggcgaaaaccattcttcacgccgggccgccgatcacctag

SEQ ID NO: 889961 - DNA, 75 bp, synthetic construct
  source 1..75: mol_type = other DNA
ctgtatgatgctgtggatagtattgtaaaagcaggttctaacccgacggaaaccctggaggcaatgaaagcgctg

SEQ ID NO: 889962 - DNA, 75 bp, synthetic construct
  source 1..75: mol_type = other DNA
atgaagattgtcattgcgccagactcttttaaagagagtttaagtgcagaaaaatgttgtcaggcaattaaagcc

SEQ ID NO: 889963 - DNA, 75 bp, synthetic construct
  source 1..75: mol_type = other DNA
aataaagatggcaataaagttgatttctacggcaagatggttggcgaacgcctctgcaaggttctttgctgccgt

SEQ ID NO: 889964 - DNA, 75 bp, synthetic construct
  source 1..75: mol_type = other DNA
ccaaacatcgtgaacatttgctcgagtttatccgcctggatgaacccgctccgcttaacgccatgacgctggcgc

SEQ ID NO: 889965 - DNA, 75 bp, synthetic construct
  source 1..75: mol_type = other DNA
aaacttaacgtcggtgacgacgaatttaagtttattttttacatcatgtcacagaaaaaatttctacgccaacag

SEQ ID NO: 889966 - DNA, 75 bp, synthetic construct
  source 1..75: mol_type = other DNA
tacgtcattaggaactaggcgtttaaagagtgaacttctctatgtaggtggcgttccttctatggtttctaaaat

SEQ ID NO: 889967 - DNA, 75 bp, synthetic construct
  source 1..75: mol_type = other DNA
tttgctgcgcctattcttcttaggtcagcaaaaagcaatatatcaaagatagtttttgttggtatgatttgtctt

SEQ ID NO: 889968 - DNA, 75 bp, synthetic construct
  source 1..75: mol_type = other DNA
acgatttatcagccggggagcttcacgccactcatcagggtcgaaaccgccaccggtgagctggcgaaaacgcag

SEQ ID NO: 889969 - DNA, 75 bp, synthetic construct
  source 1..75: mol_type = other DNA
aagcgaatatcaggatcggcggcacgatagatccgtcgtggaaaaaatcggtagatggacttaagcacggattat

SEQ ID NO: 889970 - DNA, 75 bp, synthetic construct
  source 1..75: mol_type = other DNA
gctgatggcgcagttcagggacatgtggcactgtcaaatctccgtaatgttctgagttcttccattgatgaaatc

SEQ ID NO: 889971 - DNA, 75 bp, synthetic construct
  source 1..75: mol_type = other DNA
gcgaaagcagtatgaaaagctgggtaaaaaaattcatgatgccaccggagagcaggacaaatttaaccgtaagct

SEQ ID NO: 889972 - DNA, 75 bp, synthetic construct
  source 1..75: mol_type = other DNA
tcaaaaaagtgttttgcgtgaacttattaaaaagaataatgatatcataattacgcaatgcacatttgagctaga

SEQ ID NO: 889973 - DNA, 75 bp, synthetic construct
  source 1..75: mol_type = other DNA
aagcgaatatcaggatcggcggcacgatagatccgtcgtggaaaaaatcggttgatggactgaagcacggattat

SEQ ID NO: 889974 - DNA, 75 bp, synthetic construct
  source 1..75: mol_type = other DNA
aagcgaatatccggatcggcggcacgatagatccgtcgtggaaaaattctgttaatggcctgaaaaagggccttt

SEQ ID NO: 889975 - DNA, 75 bp, synthetic construct
  source 1..75: mol_type = other DNA
ggtggatatgaaaaagcaatgatttccgctatgcgctataatcctcgctacatatttcttggtgaaatacgtagc

SEQ ID NO: 889976 - DNA, 75 bp, synthetic construct
  source 1..75: mol_type = other DNA
aggccggtttaattattcctgtcgcgcggctgcgcccggtgctgacactcaaaaacagtggagggaaaaaaggat

SEQ ID NO: 889977 - DNA, 75 bp, synthetic construct
  source 1..75: mol_type = other DNA
ggtaaaaagtgcagacttatccggggcgtttcccaatgggtaagtccgacttccgggtgcacacctttgaagaag

SEQ ID NO: 889978 - DNA, 75 bp, synthetic construct
  source 1..75: mol_type = other DNA
ataagcctgaaagtgggtggttcgtttgtggtcatccattcagggggcgtggacatcgtcgggccgaaaatcaat

SEQ ID NO: 889979 - DNA, 75 bp, synthetic construct
  source 1..75: mol_type = other DNA
gcaaaggacggctggcagcgaaatacacggcgacgcaacttacgcgtactgaacttggcagcagggtaatttgtc

SEQ ID NO: 889980 - DNA, 75 bp, synthetic construct
  source 1..75: mol_type = other DNA
acagattgatcaaatcatcgacgcggaactgtttgcactgtcaggtctggatgcgcagcatctgcaactgctggt

SEQ ID NO: 889981 - DNA, 75 bp, synthetic construct
  source 1..75: mol_type = other DNA
cgggtgatttgtcgcgataaacaactcatcttcgaagaagcgccacaagcctataaatcggcagaaagcgtggtg

SEQ ID NO: 889982 - DNA, 75 bp, synthetic construct
  source 1..75: mol_type = other DNA
ttgacctgtggtcatgtgccgttattggctggtcaatgtcgccacgcatgacggcgcaactggcctgcgatgccc

SEQ ID NO: 889983 - DNA, 75 bp, synthetic construct
  source 1..75: mol_type = other DNA
ctgacggatgaactgcgtgttcagggttaccactttaacgtaaaaaccgtggcggcaagcctgcgccgtcagggg

SEQ ID NO: 889984 - DNA, 75 bp, synthetic construct
  source 1..75: mol_type = other DNA
tatccattacgtgatgatgagaagtatgttttcctctcaccaggatacttattagatgataagaaaaataaaaag

SEQ ID NO: 889985 - DNA, 75 bp, synthetic construct
  source 1..75: mol_type = other DNA
accagcaccggtgggttatgcctgtactactccgcgcgaagcagaagaagccgcttcaaaaatcggtgccggtcc

SEQ ID NO: 889986 - DNA, 75 bp, synthetic construct
  source 1..75: mol_type = other DNA
gccgatgggcgaaacagtgaatgctttttatggccttaccggcgacgggaaaacggcggtgattgagatggcggc

SEQ ID NO: 889987 - DNA, 75 bp, synthetic construct
  source 1..75: mol_type = other DNA
tcagcagttccgtcagcactgcgacagcgtggtactcgcggcttttatccggtcaaaacagcgctacggagcacc

SEQ ID NO: 889988 - DNA, 75 bp, synthetic construct
  source 1..75: mol_type = other DNA
tatggcagcctccggttttggaacgggaggtaaataccagcaggcgatacaggccgcaacggcagcggtacaggg

SEQ ID NO: 889989 - DNA, 75 bp, synthetic construct
  source 1..75: mol_type = other DNA
ccgaatgttgaacagtctacgcaagccctattaggtatgcagtttattatgattgctctaccaactctgtttttc

SEQ ID NO: 889990 - DNA, 75 bp, synthetic construct
  source 1..75: mol_type = other DNA
gcgcggcgtggcggcgatttatggtccaggtacacctatgctcgacagtgtgcgcgacgtactgaatctgataag

SEQ ID NO: 889991 - DNA, 75 bp, synthetic construct
  source 1..75: mol_type = other DNA
ccacatcttttcttcctggtggcgcgccaaaacacaaaacgttcactctggagctgaaatactatggcgaaaaac

SEQ ID NO: 889992 - DNA, 75 bp, synthetic construct
  source 1..75: mol_type = other DNA
cctgcttcagtacacaggcaagggagcacgaacgatagcccttgaaggaatggcgcatgcgggatttcgtgaggg

SEQ ID NO: 889993 - DNA, 75 bp, synthetic construct
  source 1..75: mol_type = other DNA
cgcgtcaacaacctgacgcaatccatcctggcaaaagcgttccgtggtgaactcaccgcccagtggcgggccgaa

SEQ ID NO: 889994 - DNA, 75 bp, synthetic construct
  source 1..75: mol_type = other DNA
agtggataaaaacgatccgggatttgcccatcccaccaagcccatcggcgcattctttagtgacagccagcgtga

SEQ ID NO: 889995 - DNA, 75 bp, synthetic construct
  source 1..75: mol_type = other DNA
aatcaggtgaaatggttcgccttcgtactctggaaagtatctggatacaaggcaagttgcgcatgtggggccgct

SEQ ID NO: 889996 - DNA, 75 bp, synthetic construct
  source 1..75: mol_type = other DNA
agtattctaatggtaaagggcagcaaacattctcagcttcgagggtaaaatttaagacggctagaatacttcatt

SEQ ID NO: 889997 - DNA, 75 bp, synthetic construct
  source 1..75: mol_type = other DNA
ttgccaaaaatcatcgccagcctgacatttttagaacaaggcggcaaagaagtgattatcaccacgccggaatgc

SEQ ID NO: 889998 - DNA, 75 bp, synthetic construct
  source 1..75: mol_type = other DNA
gatactcggaccttgcccttagaaccaccttgctggatgtcaaaactgctcgagccaatcgcccaggaagtgaaa

SEQ ID NO: 889999 - DNA, 75 bp, synthetic construct
  source 1..75: mol_type = other DNA
aacttaactaatcagcgttataatataaccgtcatggagccgcatgaagtttgtgccagaataaaggcgaccagg

SEQ ID NO: 890000 - DNA, 75 bp, synthetic construct
  source 1..75: mol_type = other DNA
aatatcggcttcaaacaggatggtaagaatgggcagactaagtggttagatgaatatgttatgcgtgattatttg

SEQ ID NO: 890001 - DNA, 75 bp, synthetic construct
  source 1..75: mol_type = other DNA
ctatgttttttgattggttgagtattgagcaagattttggttatcagctgcccattttgggggacgttgcgtatc

SEQ ID NO: 890002 - DNA, 75 bp, synthetic construct
  source 1..75: mol_type = other DNA
atagctcgttcggatcggtaatagcccctggtggtgaaggtggtggaaaatcaggagtcacaaacacgaacggtg

SEQ ID NO: 890003 - DNA, 75 bp, synthetic construct
  source 1..75: mol_type = other DNA
tcaggtggcggtggcgcatacgatgccggttatagcggaaccagtatgacaggcgggaaaggtgctgctgggatt

SEQ ID NO: 890004 - DNA, 75 bp, synthetic construct
  source 1..75: mol_type = other DNA
ggcggtggcgttagaggcagggcatttggttcaggcggaggtggtgcacacgatgcaggttatagcggaaccagt

SEQ ID NO: 890005 - DNA, 75 bp, synthetic construct
  source 1..75: mol_type = other DNA
atggccgacgaagcggctataacattcattggcgctcaacgtttgttacttgatgcagacattcaaaatgagacc

SEQ ID NO: 890006 - DNA, 75 bp, synthetic construct
  source 1..75: mol_type = other DNA
tgagctgtatgaattactcgagcctgttgaatcgcggcgatttagacaaagttattttagaaaatcggcaacggc

SEQ ID NO: 890007 - DNA, 75 bp, synthetic construct
  source 1..75: mol_type = other DNA
ctcgattttactatgcatctctatgggaacgtcttgctccaagccaaaaggatacgctaaggcttatctgtgcct

SEQ ID NO: 890008 - DNA, 75 bp, synthetic construct
  source 1..75: mol_type = other DNA
gattcctgccagtttcatgccgcgcatcgttattggcctgatcggtatcggttctgcgtcttacctcgtttcttt

SEQ ID NO: 890009 - DNA, 75 bp, synthetic construct
  source 1..75: mol_type = other DNA
ttgatgatatgtctacgctaaaggataataaaaaggatgaaggaaagaattatgtaaatcacattaccgaggtaa

SEQ ID NO: 890010 - DNA, 75 bp, synthetic construct
  source 1..75: mol_type = other DNA
atagtgatggtaaattagaaaaatggacccttcggctaatagtgtcagcaggagaacaccccttacctaaaattt

SEQ ID NO: 890011 - DNA, 75 bp, synthetic construct
  source 1..75: mol_type = other DNA
agcccaatacgaaaagaaatcatcgacaggttcatcgaacagctacatgctatgctgtcgcactacgacgaactt

SEQ ID NO: 890012 - DNA, 75 bp, synthetic construct
  source 1..75: mol_type = other DNA
tgtggcggggattatcaacggcggcggctgcctgtacgttatcggctcgatggacgacgaggcggtgatccgtgt

SEQ ID NO: 890013 - DNA, 75 bp, synthetic construct
  source 1..75: mol_type = other DNA
aaatatcataccttcactttcccctgattttggcgattgttcgtattgtggtaccaaaggtattgagattattga

SEQ ID NO: 890014 - DNA, 75 bp, synthetic construct
  source 1..75: mol_type = other DNA
ccgcgatgataaactgtacagcgtgcggcacctggtgtttaacggctttgagctgataagccagcagttcagccg

SEQ ID NO: 890015 - DNA, 75 bp, synthetic construct
  source 1..75: mol_type = other DNA
gtcgtcattatattattaatttcccatttgaatctgacggtaaaaaaaatagagcttccagggaaggcatcttat

SEQ ID NO: 890016 - DNA, 75 bp, synthetic construct
  source 1..75: mol_type = other DNA
gggatgtgatttatgggatcaatgtccgtattgtcaaaccggtcaacatttatgaatgtgaactcagggacaacg

SEQ ID NO: 890017 - DNA, 75 bp, synthetic construct
  source 1..75: mol_type = other DNA
gttggcgcggctgctggcgttcctgctgcttgacggtcattttgcggctgctgacgaggcggtgaacgcgaaact

SEQ ID NO: 890018 - DNA, 75 bp, synthetic construct
  source 1..75: mol_type = other DNA
gacatgttgtacttctgtcaacgacggatgaaaagtggctcttccgcaacctgggtggagattttcatgccagtg

SEQ ID NO: 890019 - DNA, 75 bp, synthetic construct
  source 1..75: mol_type = other DNA
tcgttgaggacgaaacgccgctggcagagatgcatgctgaatatattcgtcacattcccggattcagtcagatat

SEQ ID NO: 890020 - DNA, 75 bp, synthetic construct
  source 1..75: mol_type = other DNA
tctggggtgagcaaagctgcattattcatctgccagaacgtctggaagacacgaccaaacgcctgattttacctt

SEQ ID NO: 890021 - DNA, 75 bp, synthetic construct
  source 1..75: mol_type = other DNA
ggatatacagttattgttgccgcgcgtaacgaagaaaccttacagcaatgtgcacaaggattagccaaggaacgc

SEQ ID NO: 890022 - DNA, 75 bp, synthetic construct
  source 1..75: mol_type = other DNA
atgacaaaaattgccctggtgacggggggaagtaaaggcatcggctacgcagcagcaaaggcactctatgacatt

SEQ ID NO: 890023 - DNA, 75 bp, synthetic construct
  source 1..75: mol_type = other DNA
cgaagcacatcgcactggcagggatttcatatctggagaaacaaagtgaatatatgaaggcgagaatagcaaagg

SEQ ID NO: 890024 - DNA, 75 bp, synthetic construct
  source 1..75: mol_type = other DNA
gtcggtgaacaacgtggaacatatatactcaagccactgagtatgaaaggtaatctcaccgccgaaaaaattgaa

SEQ ID NO: 890025 - DNA, 75 bp, synthetic construct
  source 1..75: mol_type = other DNA
taatgccagcgaaggtctctccagtatttttgaagttattaaactcgaaagctacgaagacgccctgaacaattt

SEQ ID NO: 890026 - DNA, 75 bp, synthetic construct
  source 1..75: mol_type = other DNA
ttaaagattccagttggctcagctttatggaaagtcggctggaagttgcaaatagactgatgaagcctaacacac

SEQ ID NO: 890027 - DNA, 75 bp, synthetic construct
  source 1..75: mol_type = other DNA
ttatagcacaaaaggattacttgatctcagtggattacttagaaagcgatcagcttgaaactgtatgccagaatg

SEQ ID NO: 890028 - DNA, 75 bp, synthetic construct
  source 1..75: mol_type = other DNA
ccgttgatgaagaagacggcgagattgttcgtagcctgaaaatccgccagatcgaacctgaattcttgaacctga

SEQ ID NO: 890029 - DNA, 75 bp, synthetic construct
  source 1..75: mol_type = other DNA
ttagttgaaactttcaactatctcattggattacatgtgaaatccatcgaatccaatatcgaacgtggctatgtg

SEQ ID NO: 890030 - DNA, 75 bp, synthetic construct
  source 1..75: mol_type = other DNA
cccattggtgagaatggggaagaaagagtttggtcgctttcttatgaaggggctaaaaaagcaattgaagtaggt

SEQ ID NO: 890031 - DNA, 75 bp, synthetic construct
  source 1..75: mol_type = other DNA
ccgtcaccgtggtgacccaggtggaagtggataaaaacgatccgggttttgctcatcccaccaaacccattggcg

SEQ ID NO: 890032 - DNA, 75 bp, synthetic construct
  source 1..75: mol_type = other DNA
acgatgattatattagcttaaaagatagaataaaagaacgcgagcttatcatgggccgatttaataatgatgaat

SEQ ID NO: 890033 - DNA, 75 bp, synthetic construct
  source 1..75: mol_type = other DNA
atcaaggagcgctggaaaataaagactattacacgaaaaaattcatgaaactaaaaccaggaagtaagggtttta

SEQ ID NO: 890034 - DNA, 75 bp, synthetic construct
  source 1..75: mol_type = other DNA
gcaagtctttaaaaatctttggattgataagaaatatcagtctgagtttaatggtacaaatttactgaaaaacat

SEQ ID NO: 890035 - DNA, 75 bp, synthetic construct
  source 1..75: mol_type = other DNA
cagaaattttatataaaaatgaatataagcacagcagctggaattcattaatgtatgaaaggatatctaaaagct

SEQ ID NO: 890036 - DNA, 75 bp, synthetic construct
  source 1..75: mol_type = other DNA
tgacgataatttagatggtctcttaattaattcagataattaccaggccattaattttttggaggggcggtataa

SEQ ID NO: 890037 - DNA, 75 bp, synthetic construct
  source 1..75: mol_type = other DNA
ccgctggcggtggctgccgcgcacgcggtgctcaacattatcgacaaagagtcactctgtgagcgcgccatgcag

SEQ ID NO: 890038 - DNA, 75 bp, synthetic construct
  source 1..75: mol_type = other DNA
gccattattttcgaaccggtacagggcgagggcggttttaacgtggcgccaaaagagctggtttctgcgattcgc

SEQ ID NO: 890039 - DNA, 75 bp, synthetic construct
  source 1..75: mol_type = other DNA
ctgaactggtcgcggcagtggaacagcagttgcagcagttcacccatacggcgtaccagatcgtgccgtacgaaa

SEQ ID NO: 890040 - DNA, 75 bp, synthetic construct
  source 1..75: mol_type = other DNA
cgctgatggcgctcgaatggcggcggcatgtgctgaatacgcagctttcagtggtgatgtttatgctgcggcgga

SEQ ID NO: 890041 - DNA, 75 bp, synthetic construct
  source 1..75: mol_type = other DNA
cggaatcccgcctgttgtctggatatgcaagccagattgtggaagctatccaaaatgatgagtctgccccgcacc

SEQ ID NO: 890042 - DNA, 75 bp, synthetic construct
  source 1..75: mol_type = other DNA
ggccatcgcggcggtacgtggtctgggctcgatgattgcggcagaatttaacgacccgcaaacgggcgagccgtc

SEQ ID NO: 890043 - DNA, 75 bp, synthetic construct
  source 1..75: mol_type = other DNA
gatggctccgggaggcttatacagtgtcaggtgtttaaaagctcaggtacatacactccgacaaaaggcacaaga

SEQ ID NO: 890044 - DNA, 75 bp, synthetic construct
  source 1..75: mol_type = other DNA
ttattgagcgagatggttttacttgtcagaacccaggttgtgatggaacagacaaaaggctaacaactcatcaca

SEQ ID NO: 890045 - DNA, 75 bp, synthetic construct
  source 1..75: mol_type = other DNA
ctccaggtgaaggcgccagctcctccgtcgttatcagttcttcaataattgtcgacgcccctggtggatcgtctc

SEQ ID NO: 890046 - DNA, 75 bp, synthetic construct
  source 1..75: mol_type = other DNA
tgaaggatattgagggtaacgaatacatcgattttgccgcaggcattgcggtgctgaacaccggacatcgccatc

SEQ ID NO: 890047 - DNA, 75 bp, synthetic construct
  source 1..75: mol_type = other DNA
atgagcaacaatgaattccatcagcgtcgtctttctgccaccccacgcggggttggcgtgatgtgtaacttcttc

SEQ ID NO: 890048 - DNA, 75 bp, synthetic construct
  source 1..75: mol_type = other DNA
gctacgtcaccctggcggagaaaatcaacgcccttgccccggtgagcgggcaggctaaaactgcgttcttcacca

SEQ ID NO: 890049 - DNA, 75 bp, synthetic construct
  source 1..75: mol_type = other DNA
tagtggagttaccaatagatgttactctggatactacaaaaggaaaatgtggtgatacagaaggaagtgctattt

SEQ ID NO: 890050 - DNA, 75 bp, synthetic construct
  source 1..75: mol_type = other DNA
agatcatgaaacttatcaggggcaaatttggtgatctgtcaaaagtggctgattccgatttgctgaaaagcgcct

SEQ ID NO: 890051 - DNA, 75 bp, synthetic construct
  source 1..75: mol_type = other DNA
actctcgaattaaactgcactaatgctgacctaaaggggttactgaaaagtaaaaaaattatattactactagat

SEQ ID NO: 890052 - DNA, 75 bp, synthetic construct
  source 1..75: mol_type = other DNA
aagcatctcgattcaatgcctaaaaatgcaagagaattttacaatagaatatttaatatactatttgaaggccat

SEQ ID NO: 890053 - DNA, 75 bp, synthetic construct
  source 1..75: mol_type = other DNA
ggatgcgttcgggaaggaatgggatgcacggtacccgcagataagtcgcaactggcgggcaaacgtaagcggctc

SEQ ID NO: 890054 - DNA, 75 bp, synthetic construct
  source 1..75: mol_type = other DNA
tctttcgtggccaattttacccggacaaactcagcgctgcccaacgtgtctgcgagacgttattccgggtccgga

SEQ ID NO: 890055 - DNA, 75 bp, synthetic construct
  source 1..75: mol_type = other DNA
gcacaggaagtggcgaaggctccgtattaaccggtggtaaagccatcagcgcggggccgggtggcattgcggcag

SEQ ID NO: 890056 - DNA, 75 bp, synthetic construct
  source 1..75: mol_type = other DNA
gaaaatgctgaaaccgtcaggcatagtgcttgcctggtgaattgcggaagtcgttgtccattaaaggttatcgta

SEQ ID NO: 890057 - DNA, 75 bp, synthetic construct
  source 1..75: mol_type = other DNA
cattttaaattcacgactttcgatgatgtcgacgatgcaaccatcgccgaatggacgggattaagccgtagctag

SEQ ID NO: 890058 - DNA, 75 bp, synthetic construct
  source 1..75: mol_type = other DNA
ggttatcatttccagatattccacagtgattgtacggggtctctggcaatgtcatatagttatatatcacttcca

SEQ ID NO: 890059 - DNA, 75 bp, synthetic construct
  source 1..75: mol_type = other DNA
gatgtattaacacattgaccagccacctgccgtcgccgctggcgaaagggaacccgcaacataccaacctggttg

SEQ ID NO: 890060 - DNA, 75 bp, synthetic construct
  source 1..75: mol_type = other DNA
gacagcaacggtgtggacgtgggtggatgtattaacacattgaccagccacctgccgtcgccgctggcgaaaggg

SEQ ID NO: 890061 - DNA, 75 bp, synthetic construct
  source 1..75: mol_type = other DNA
tgtttttggtgaacatcagattcgaccttgcctacgtggtcgttccagccgctggcgtgtttatagccccgaccg

SEQ ID NO: 890062 - DNA, 75 bp, synthetic construct
  source 1..75: mol_type = other DNA
ggttcgggttacggttctggcggcggcccatcatccgttacagcgggcaatgctgctgtggctggtggtgatggc

SEQ ID NO: 890063 - DNA, 75 bp, synthetic construct
  source 1..75: mol_type = other DNA
ccggaatgccaacaacaccaacagcgccacaggggactaatagtacccagatcgcaagcacggctttcgttatgg

SEQ ID NO: 890064 - DNA, 75 bp, synthetic construct
  source 1..75: mol_type = other DNA
agcggggtctatcaagcaaatattggtggcgcatcgacattaatcctccatttcaatatgagcgaggggagttgc

SEQ ID NO: 890065 - DNA, 75 bp, synthetic construct
  source 1..75: mol_type = other DNA
atggtgatgcttatgctcctggctggcgacgagactacaacacgaaaaaccagcagcctgcatttgctttaggga

SEQ ID NO: 890066 - DNA, 75 bp, synthetic construct
  source 1..75: mol_type = other DNA
gtgttccgcaacgccatgctgctggtgattgccggttttccggcgacgtttatcagcatgttttttaccggctcg

SEQ ID NO: 890067 - DNA, 75 bp, synthetic construct
  source 1..75: mol_type = other DNA
ggttattcaatatcttggtctgagcgatgcaagtggatacgttggacgctggctgaatacccgggttttcacctc

SEQ ID NO: 890068 - DNA, 75 bp, synthetic construct
  source 1..75: mol_type = other DNA
taatagcccctggtggtgaaggtggtggaaaatcaggagtcacaaacacgaacggtggtaacggcggtgtgccaa

SEQ ID NO: 890069 - DNA, 75 bp, synthetic construct
  source 1..75: mol_type = other DNA
ggcggtggcgcatacgatgccggttatagcggaaccagtatgacaggcgggaaaggtgctgctgggatttgtatt

SEQ ID NO: 890070 - DNA, 75 bp, synthetic construct
  source 1..75: mol_type = other DNA
gaaattcacgccgacattctggtgatcaccactggcgtggaaaaagtgtgtattcactttggcaaaccgcagcag

SEQ ID NO: 890071 - DNA, 75 bp, synthetic construct
  source 1..75: mol_type = other DNA
cccgtgcactacatcacggtgtgcgcggtcgctttcccacaccgaacacgccaccgtccacgtccacacaccacc

SEQ ID NO: 890072 - DNA, 75 bp, synthetic construct
  source 1..75: mol_type = other DNA
atattcgcctgggcacacgtgttgttcagactatgcaaaaaggtgtgatgtatgagaaagcagggcacgtaatta

SEQ ID NO: 890073 - DNA, 75 bp, synthetic construct
  source 1..75: mol_type = other DNA
tgaatatgctctatatcgacccgcagaacagcagccagattattgctgaacaggtgatccctgaaaacgagggcg

SEQ ID NO: 890074 - DNA, 75 bp, synthetic construct
  source 1..75: mol_type = other DNA
gtttgatgagtcaggggaattgattgccgtggggaactgcccggaaagctataaaccgcaactggctgaaggcag

SEQ ID NO: 890075 - DNA, 75 bp, synthetic construct
  source 1..75: mol_type = other DNA
caataacgggcggcggtggcggagggggcggctgcaaggctatatccaataatgaaacgtttttcggtgctggcg

SEQ ID NO: 890076 - DNA, 75 bp, synthetic construct
  source 1..75: mol_type = other DNA
ttgccgagcaaaaaatcatcgctgaaaaactcgatactctgctggcgcgggtagacagtaccatgatcctaccca

SEQ ID NO: 890077 - DNA, 75 bp, synthetic construct
  source 1..75: mol_type = other DNA
actggcggcttcaaccagtaccggataccagcgttccgaaagcagccagcaactggctggcaccatgaacacgct

SEQ ID NO: 890078 - DNA, 75 bp, synthetic construct
  source 1..75: mol_type = other DNA
atggctggccgctgtatgaatcatgcctgaagggaaagctgcacgttatcagcaagcgttacactcagcgcattg

SEQ ID NO: 890079 - DNA, 75 bp, synthetic construct
  source 1..75: mol_type = other DNA
tatgtcaaggcgcgcgttgataatcctgtagcgaccactgtcactatcggcgcgggtggtattggtacaagtgcg

SEQ ID NO: 890080 - DNA, 75 bp, synthetic construct
  source 1..75: mol_type = other DNA
tccgcttcctgtgagtcgcggaggtacaggaggcaggaacaaggctgaatcccttaaaaaccttggactcggtga

SEQ ID NO: 890081 - DNA, 75 bp, synthetic construct
  source 1..75: mol_type = other DNA
cggtggacctgttgcgacgtcaacaggcacgcctaatactgctctggcaggtggtaacggatctatgggtattgt

SEQ ID NO: 890082 - DNA, 75 bp, synthetic construct
  source 1..75: mol_type = other DNA
ccatctggttcgcgcctggaaccgtacctacggcctgccggtggtggtgactaactgctccaacaactatggtcc

SEQ ID NO: 890083 - DNA, 75 bp, synthetic construct
  source 1..75: mol_type = other DNA
caccgatgacctgttcaccgaagataccccgtacgcgcccagcagcccttactctgcctccaaagcgggcagcga

SEQ ID NO: 890084 - DNA, 75 bp, synthetic construct
  source 1..75: mol_type = other DNA
gccatgtggatcgctccattgatggcccggcagcctttatccagaccaacgtgatcggtaccttcactctgctgg

SEQ ID NO: 890085 - DNA, 75 bp, synthetic construct
  source 1..75: mol_type = other DNA
gtgatcggcaccttcactctgctggaggcagcccgccactactggtccgggcttggagaggtacagaagcaggcc

SEQ ID NO: 890086 - DNA, 75 bp, synthetic construct
  source 1..75: mol_type = other DNA
atcgtgatgcacctggcggcggaaagccatgtggaccgttccattgatggcccggccgcgtttatccagaccaac

SEQ ID NO: 890087 - DNA, 75 bp, synthetic construct
  source 1..75: mol_type = other DNA
cattctcgacaaggtagtggcgcagaagccgggcaacatcacccactttgctgacctgatcacttttgtcaccga

SEQ ID NO: 890088 - DNA, 75 bp, synthetic construct
  source 1..75: mol_type = other DNA
catctatagatgtcatattgttttttaaccatacatatatgacggaactatattacgaccccgaagaaaaaaatc

SEQ ID NO: 890089 - DNA, 75 bp, synthetic construct
  source 1..75: mol_type = other DNA
gatttaattatgagaacgattaagacatctatagatgtcatattgttttttaaccatacatatatgacggaacta

SEQ ID NO: 890090 - DNA, 75 bp, synthetic construct
  source 1..75: mol_type = other DNA
agtgcggtgattatcggtctggtttacattctgctgccgtttatggtgatgccgctgtactccagtatcgaaaaa

SEQ ID NO: 890091 - DNA, 75 bp, synthetic construct
  source 1..75: mol_type = other DNA
ctgctgccggtcgtaaaacgggcggctcggtggatctgctctgggtgaacggcgaaaacttccgcaccttaaaag

SEQ ID NO: 890092 - DNA, 75 bp, synthetic construct
  source 1..75: mol_type = other DNA
ccggatgtctgttggtgatgctgccagcaatgggcctgttctatgtttctgacctgatgggcggtgcgaaaaacc

SEQ ID NO: 890093 - DNA, 75 bp, synthetic construct
  source 1..75: mol_type = other DNA
ccatattcacctgttttataaaaagggaattgtggatgccaagtcgattattgaagcctgtatgcgccttaaacc

SEQ ID NO: 890094 - DNA, 75 bp, synthetic construct
  source 1..75: mol_type = other DNA
ggacacgctggagcaggccctgacacatgattctgatggtctgctggttcgcctgatggatattcatgaagtggg

SEQ ID NO: 890095 - DNA, 75 bp, synthetic construct
  source 1..75: mol_type = other DNA
ggaaagcgttcttaagtcagcaaatactctctggttactgcgctacaaacccgaagatatccccgtactgaggga

SEQ ID NO: 890096 - DNA, 75 bp, synthetic construct
  source 1..75: mol_type = other DNA
attgatgatccgaaactgcgcgctaagatacggcagcatgcatgggatcaaccacaaataactgatgcttcggtt

SEQ ID NO: 890097 - DNA, 75 bp, synthetic construct
  source 1..75: mol_type = other DNA
tttcgtcgctacaaaccaaatatgccctgaaaggctataacgtcgaagccaccgctctggaagctgccggtggca

SEQ ID NO: 890098 - DNA, 75 bp, synthetic construct
  source 1..75: mol_type = other DNA
tgaatatatttctgtttcgtcatcccgaactcactcgtcaattaagattgataaggaccgttatctctccggcaa

SEQ ID NO: 890099 - DNA, 75 bp, synthetic construct
  source 1..75: mol_type = other DNA
ctggtccctgtctactttggatgccgttattcaccataaacctctgacgccgcgctggtctttgataatttcgcc

SEQ ID NO: 890100 - DNA, 75 bp, synthetic construct
  source 1..75: mol_type = other DNA
gcagcgtgctactgagtactgcgggcgcggcggtcagcagcgatgaagtgaaggaagcgccaacggactacgcaa

SEQ ID NO: 890101 - DNA, 75 bp, synthetic construct
  source 1..75: mol_type = other DNA
cggtggcttctgctctgtttagtggcgcggctatggctgcacctgctgctaatgatgcaagtactgcaactttga

SEQ ID NO: 890102 - DNA, 75 bp, synthetic construct
  source 1..75: mol_type = other DNA
gttatttttcattgcccttcatgatatcggaaagtttgatatacgattccaatataaatcagcagaaagttggct

SEQ ID NO: 890103 - DNA, 75 bp, synthetic construct
  source 1..75: mol_type = other DNA
ctatggatgaaatcgatataaatgtcaatgatccaagaaataatggtgattttcttatccttagccatgctatag

SEQ ID NO: 890104 - DNA, 75 bp, synthetic construct
  source 1..75: mol_type = other DNA
ctttttcaacgttccacccgtcggttgagcctgacgcctgatggcgagcgttttcttgccagttgccagagcgca

SEQ ID NO: 890105 - DNA, 75 bp, synthetic construct
  source 1..75: mol_type = other DNA
taaagcagcagatacgactggctctaaagtttctccgggatcagtttccgctagaggtgtgatgaccattaaagc

SEQ ID NO: 890106 - DNA, 75 bp, synthetic construct
  source 1..75: mol_type = other DNA
tttagtgtttcgttggtgaattgtgatagtggaaccggaaagattacttacaatattgcggatgctaatgcgtct

SEQ ID NO: 890107 - DNA, 75 bp, synthetic construct
  source 1..75: mol_type = other DNA
aacagagccaatacgcgtcttgatgcccaggactatttcgattgcctgcgctgcttgcgtatgtacgcagaatga

SEQ ID NO: 890108 - DNA, 75 bp, synthetic construct
  source 1..75: mol_type = other DNA
ccgggctgaagcgggtggtgaaaaaagaactggcggacggcagcgtcacgcacagcgggtatgacgcggcaggaa

SEQ ID NO: 890109 - DNA, 75 bp, synthetic construct
  source 1..75: mol_type = other DNA
tgtaaaaaaggcgatattatcctgcgtctcgatgatcgggattatcgtgcaaatgtcgccaggcttgaggcaaaa

SEQ ID NO: 890110 - DNA, 75 bp, synthetic construct
  source 1..75: mol_type = other DNA
gtcaatcagctggcgagcaatgtgcaaacattaaatgccaaaatcgcccggcttgagcaggatatgaaagcatta

SEQ ID NO: 890111 - DNA, 75 bp, synthetic construct
  source 1..75: mol_type = other DNA
cgactggtatcttctgaattccagctcacttttgcaggctatgaagatatcagtgtacttgttcgtacgtgcaaa

SEQ ID NO: 890112 - DNA, 75 bp, synthetic construct
  source 1..75: mol_type = other DNA
atcagaatgatcgtgatgcacgaaacacgaaaaacgagcatcagggccaggacgacaacctgatcgcctttccca

SEQ ID NO: 890113 - DNA, 75 bp, synthetic construct
  source 1..75: mol_type = other DNA
catcctggttccctggatcatcagcctgattgcaccggtgctgtggctgatctggcataagaggcgtgcggtcag

SEQ ID NO: 890114 - DNA, 75 bp, synthetic construct
  source 1..75: mol_type = other DNA
tacagcccggatgtggtgacgggcctcatcacgcgcatcaccacgccggatggcagggcatcggcgttttactat

SEQ ID NO: 890115 - DNA, 75 bp, synthetic construct
  source 1..75: mol_type = other DNA
gaaaatgatgtttatgatagtctaaatttttcaagcaaagatttaacgaattcttatatgaatggaatgggaaaa

SEQ ID NO: 890116 - DNA, 75 bp, synthetic construct
  source 1..75: mol_type = other DNA
acgtactacaaaagcggtacgtttgccaccgaatcgctggtctggccggattcggtggatgcggtgaaaaaagcc

SEQ ID NO: 890117 - DNA, 75 bp, synthetic construct
  source 1..75: mol_type = other DNA
tttgatacagagtcgaacaaatggtatttatgtgtatctgcggcatgtgatttggttcctactcagggtaacgac

SEQ ID NO: 890118 - DNA, 75 bp, synthetic construct
  source 1..75: mol_type = other DNA
aaaaataataatacgctggatgaatttatcaaaagtgtttttgatagctattcaaatgaatacgctaacagctga

SEQ ID NO: 890119 - DNA, 75 bp, synthetic construct
  source 1..75: mol_type = other DNA
agttgatttagactacaacaaaattgactcatctaaacgagccgctactcttgagagcttttttcaatctaaaaa

SEQ ID NO: 890120 - DNA, 75 bp, synthetic construct
  source 1..75: mol_type = other DNA
cagatattatgaacagttaaaatatagatgcacatggttaatggatagccctcactattgggttcaatatgcaat

SEQ ID NO: 890121 - DNA, 75 bp, synthetic construct
  source 1..75: mol_type = other DNA
agatacagggctaaatattcttgatattgccgctaactatgctgatttcgtgacagaagctgttttaagaaaaac

SEQ ID NO: 890122 - DNA, 75 bp, synthetic construct
  source 1..75: mol_type = other DNA
gaataatgcgctcagtaaggacaagatctttgacattaatccaatgctgaaaattggggttgaggatgttgatgg

SEQ ID NO: 890123 - DNA, 75 bp, synthetic construct
  source 1..75: mol_type = other DNA
cgcccgcaaatttacgccgccaaatccgaagctaacagagccaatacacgccttgatgcgcaggactattttgat

SEQ ID NO: 890124 - DNA, 75 bp, synthetic construct
  source 1..75: mol_type = other DNA
gtctgggatggtcagaaagccggaacggctgtgggtgtgctggcactggcgcttgccgggaccgagcctgtgctg

SEQ ID NO: 890125 - DNA, 75 bp, synthetic construct
  source 1..75: mol_type = other DNA
caaaattagctgacctcgacctggaacaggcaacgagtgctgagtggcatcgtcgacgtctgtcagcgggtttgt

SEQ ID NO: 890126 - DNA, 75 bp, synthetic construct
  source 1..75: mol_type = other DNA
ggtcttctgtcgctaccgtaaggttcgcgggaagtccgcaaaagtccttgatgcgcatgattatggctacgaggc

SEQ ID NO: 890127 - DNA, 75 bp, synthetic construct
  source 1..75: mol_type = other DNA
gaaaaaaatttagatgaaggtgaaagcaaagcgcaatttatagttactgccgttaaaggcgaaatcaaacgccgc

SEQ ID NO: 890128 - DNA, 75 bp, synthetic construct
  source 1..75: mol_type = other DNA
tctggaccaactcattgattcgtatttatggcctgaaaatttttcttagcactaaaggctatctcaatgagttcc

SEQ ID NO: 890129 - DNA, 75 bp, synthetic construct
  source 1..75: mol_type = other DNA
gatctgatgggcggcgcgaaaaacctgcttattggcaacgtcatcaaggtgcagttcctcaatattcgtgactgg

SEQ ID NO: 890130 - DNA, 75 bp, synthetic construct
  source 1..75: mol_type = other DNA
tgcttgcgtatattgcgctggtgctgtccggcgtcacgtggggattttttgccagtgcgttgatcctgatgggga

SEQ ID NO: 890131 - DNA, 75 bp, synthetic construct
  source 1..75: mol_type = other DNA
acgcagatgaccatccgctccaaaacgtacatgggcagcggatttaatgagctgaagtttgatgatgcgacaggg

SEQ ID NO: 890132 - DNA, 75 bp, synthetic construct
  source 1..75: mol_type = other DNA
gcacggggcagtttataaacgcagccatgcgcggcgaaatcaaacgccgccagcgccgcaagaccaaagaatcag

SEQ ID NO: 890133 - DNA, 75 bp, synthetic construct
  source 1..75: mol_type = other DNA
gctgtcaggcatgaaactcggcgacacaccgctggtggagtacacccgcgaccgcctgcaccgggaaacgctgcg

SEQ ID NO: 890134 - DNA, 75 bp, synthetic construct
  source 1..75: mol_type = other DNA
ccggagacggaagcactgctctggcagcatgagaccagacatgcgtacaacgcgcaggggctggcgaaccgctgt

SEQ ID NO: 890135 - DNA, 75 bp, synthetic construct
  source 1..75: mol_type = other DNA
atctgattcgaccctaacggagatggttaacaaaggcgggttccccaaaggattccgtatcgggctgcgtcgcat

SEQ ID NO: 890136 - DNA, 75 bp, synthetic construct
  source 1..75: mol_type = other DNA
aaaggtaaaaggaaatacggcaacaaacctcagaagaataaagcgaattttatagttacagcagtacgcggtgag

SEQ ID NO: 890137 - DNA, 75 bp, synthetic construct
  source 1..75: mol_type = other DNA
ggctcaggtggaaaaaatcggagtcaaagctgccgaggagatcgggcaacttgttgccgtcgcgcgtgaagaact

SEQ ID NO: 890138 - DNA, 75 bp, synthetic construct
  source 1..75: mol_type = other DNA
tgaaagctaaagaagttgctccggtggcagtagttgaaaatgcggctgatgaggccgcaaatgatgaagtagaag

SEQ ID NO: 890139 - DNA, 75 bp, synthetic construct
  source 1..75: mol_type = other DNA
caaatgcaaagtctggcgcaggagtctgcccaggcacatgaacaaattgacagcctgtcacaagacgtaacccaa

SEQ ID NO: 890140 - DNA, 75 bp, synthetic construct
  source 1..75: mol_type = other DNA
tattaaaatatggcaatactgttaatttccgggccgatatagttgacgaaaatttaaaagggttagctgagtgga

SEQ ID NO: 890141 - DNA, 75 bp, synthetic construct
  source 1..75: mol_type = other DNA
cgttcctggaacagggcggcaaagaagtgattatcaccacgccggaatgcctgcctgcggcgctacgcggcgaaa

SEQ ID NO: 890142 - DNA, 75 bp, synthetic construct
  source 1..75: mol_type = other DNA
gcccgtacaaaacaacttcgcagggctaaaaaggcggatgtgctggctattgccagggcatggggtatcagtggt

SEQ ID NO: 890143 - DNA, 75 bp, synthetic construct
  source 1..75: mol_type = other DNA
cggtgtctttcggaacatcttttaatgccggaacgcataccgtgattaaagccggtgtctctgcggatacgcaat

SEQ ID NO: 890144 - DNA, 75 bp, synthetic construct
  source 1..75: mol_type = other DNA
ctgctgatgcgcaacaatcacagtctgaagcccaacaaacgcagattacagagcaacagaagcagatcgcagcca

SEQ ID NO: 890145 - DNA, 75 bp, synthetic construct
  source 1..75: mol_type = other DNA
cttctaaaatcatcaattgttaacaaagttataattgttgataatggtgcatcaaaaagtttagacgaattaaaa

SEQ ID NO: 890146 - DNA, 75 bp, synthetic construct
  source 1..75: mol_type = other DNA
accggaatgtacctggtgagtgatccgctggggttgctgggcggggagcagacttaccggtatgtgccgaatcct

SEQ ID NO: 890147 - DNA, 75 bp, synthetic construct
  source 1..75: mol_type = other DNA
agggcatttcccacctggcagcatgttgccaaaaatcatcgcttacaaaggagggagttatgccatatatacaag

SEQ ID NO: 890148 - DNA, 75 bp, synthetic construct
  source 1..75: mol_type = other DNA
gttactcatcatgaaatactgagatggcggcgacatgtactcagagaaaagcaacaatcggcgcagacctggaac

SEQ ID NO: 890149 - DNA, 75 bp, synthetic construct
  source 1..75: mol_type = other DNA
gactatctttttcaccacaagcgttttgttgtgtcggtgtcagaagcaaaacgtataaccggtttgccagatgag

SEQ ID NO: 890150 - DNA, 75 bp, synthetic construct
  source 1..75: mol_type = other DNA
gtgaggtctgtcagaagttatctggaccagctgacgggaatatctgctctgtattcctcatactgctcatagatc

SEQ ID NO: 890151 - DNA, 75 bp, synthetic construct
  source 1..75: mol_type = other DNA
catttttagaacagggcggcaaagaagtgattatcaccacgccggaatgcctgcccgcggcgctgcgtggcgaga

SEQ ID NO: 890152 - DNA, 75 bp, synthetic construct
  source 1..75: mol_type = other DNA
aatttcgaggttacacctcatgaactccggcctgatatctaccctaatccgaccgatggtttacctgttggatgt

SEQ ID NO: 890153 - DNA, 75 bp, synthetic construct
  source 1..75: mol_type = other DNA
gacgtggtatggctgggacggagacaggctgacgacggtgcagactgacaccacacgtatccagacggtatacga

SEQ ID NO: 890154 - DNA, 75 bp, synthetic construct
  source 1..75: mol_type = other DNA
cagccggagtgagtttacctacgatgcgcttgaccggctggtacagcagcgcggctttgacgggcggacgcaacg

SEQ ID NO: 890155 - DNA, 75 bp, synthetic construct
  source 1..75: mol_type = other DNA
acagatagagccggtttatttacctgagcgaaaagttcacctttatcactgcgaccaccggggactgccgctggc

SEQ ID NO: 890156 - DNA, 75 bp, synthetic construct
  source 1..75: mol_type = other DNA
gctcatcccaccaagcccatcggcgcattctttagtgaaagccagcgtgacgaattacaaaaggcaaaccctgac

SEQ ID NO: 890157 - DNA, 75 bp, synthetic construct
  source 1..75: mol_type = other DNA
gccctgataaataccctaacccaaccgacggtttacctgttggatgtaaggttaacacatcaaatgcgccggagt

SEQ ID NO: 890158 - DNA, 75 bp, synthetic construct
  source 1..75: mol_type = other DNA
agataatattcatcaattaggtgacattcgtgcagttagaggctacctgacgaaaaaaataatcgagcaacggtt

SEQ ID NO: 890159 - DNA, 75 bp, synthetic construct
  source 1..75: mol_type = other DNA
gcccatcccatcaaacccattggcgcattctttagtgaaagccagcgtgacgaactacaaaaggcaaaccctgac

SEQ ID NO: 890160 - DNA, 75 bp, synthetic construct
  source 1..75: mol_type = other DNA
attcggtgaacgcactctggccacactggagcgtcttctgagcctgctgtcggcctttgaggtcgtggtatggat

SEQ ID NO: 890161 - DNA, 75 bp, synthetic construct
  source 1..75: mol_type = other DNA
tcagcgatgtcggtacacacactgttggaatgtgtatttcacgactggcaaaagaactcagcctgaaagatgagc

SEQ ID NO: 890162 - DNA, 75 bp, synthetic construct
  source 1..75: mol_type = other DNA
tacactggagtgaactgtcgcccgaagaacaaatccgtttctgggaggattacgaatcgggcagggcaaggtcat

SEQ ID NO: 890163 - DNA, 75 bp, synthetic construct
  source 1..75: mol_type = other DNA
taacaggcctgctggtaattgcaggcctttttatttggggggagagggaagtgtggctgactggcaaattccaat

SEQ ID NO: 890164 - DNA, 75 bp, synthetic construct
  source 1..75: mol_type = other DNA
atgaaaattcattttctgggaaccgcagcatccgaagggatacccaatcctttttgtcgttgtgagcactgccag

SEQ ID NO: 890165 - DNA, 75 bp, synthetic construct
  source 1..75: mol_type = other DNA
atggaaggctgttgccagccactgaactggaggcattacgtaatgtagcaagaagcaatcagagcgatgtgcttt

SEQ ID NO: 890166 - DNA, 75 bp, synthetic construct
  source 1..75: mol_type = other DNA
gaacaataaacgcgcggtaactaatcggtatggcatcggagttattccatcagtcagcagttacataacaacatc

SEQ ID NO: 890167 - DNA, 75 bp, synthetic construct
  source 1..75: mol_type = other DNA
aatcctgttttattcaaccacccaatagcagcaacttaaccaccggaacggttattttaccgtgtattagccaaa

SEQ ID NO: 890168 - DNA, 75 bp, synthetic construct
  source 1..75: mol_type = other DNA
ccgtgatagcggcgaatcaggcaacgctcacaggtaacagtctgaccaaccgtggcctgttccaggccgcacaac

SEQ ID NO: 890169 - DNA, 75 bp, synthetic construct
  source 1..75: mol_type = other DNA
agcaagccaaaaaaacagaatatgccagcattacccccttccgaactccctcgcttcttggttgctctaaacaat

SEQ ID NO: 890170 - DNA, 75 bp, synthetic construct
  source 1..75: mol_type = other DNA
agaaattgggtatctggaatatcaggaaatgaagaatggcagggatatagtgttcaatatcatcaaacgcaaccc

SEQ ID NO: 890171 - DNA, 75 bp, synthetic construct
  source 1..75: mol_type = other DNA
taaaaatatttattgttcattatccgttctcatcattggttgtgcgtcagcttatgccgttgaattcaacaaaga

SEQ ID NO: 890172 - DNA, 75 bp, synthetic construct
  source 1..75: mol_type = other DNA
ccttgggagaggtgtacacctcaaccaatgccgacgtgatcaaccgttcagccctggcgcgtaagttggggatcg

SEQ ID NO: 890173 - DNA, 75 bp, synthetic construct
  source 1..75: mol_type = other DNA
tgtccctccgccgacccatgagtttgccgatggtgacgcgatgctcgctgctaccctggcgggagggggattgtc

SEQ ID NO: 890174 - DNA, 75 bp, synthetic construct
  source 1..75: mol_type = other DNA
atattcactaagcactctgattaataataagaggacgccaatccaccttgacctccaatgggtattaattgataa

SEQ ID NO: 890175 - DNA, 75 bp, synthetic construct
  source 1..75: mol_type = other DNA
ggattagcgtaaaagatgaaaccagccacaaagaattaggactggttgctgatggcggctttgtatacctcaacg

SEQ ID NO: 890176 - DNA, 75 bp, synthetic construct
  source 1..75: mol_type = other DNA
gttctcatcattggttgtgcgtcagcttatgccgttgaattcaacaaagatttaatcgaagccgaagatcgtgaa

SEQ ID NO: 890177 - DNA, 75 bp, synthetic construct
  source 1..75: mol_type = other DNA
gaaatttagcacccgaatgcaaaaaattgatcctgcattgagtgttacatctggtcaacttatgagccatgtgtt

SEQ ID NO: 890178 - DNA, 75 bp, synthetic construct
  source 1..75: mol_type = other DNA
gaacgtctggcaatgatgcaggttcaaatggataaggcgaaagctgcgaaacgcgctcgccagaaagaacaggct

SEQ ID NO: 890179 - DNA, 75 bp, synthetic construct
  source 1..75: mol_type = other DNA
tgttagggctgggcaatcaactccttatggttcgccaggggcttgctaatgttccgctcagacttcctcaggcag

SEQ ID NO: 890180 - DNA, 75 bp, synthetic construct
  source 1..75: mol_type = other DNA
ggctgccgctgccgcccgagagagcgaaagggcgttatctgatctgaccgctgggtttgcatcggcaggaagagc

SEQ ID NO: 890181 - DNA, 75 bp, synthetic construct
  source 1..75: mol_type = other DNA
gaactggactgcctgaagaaaacaagtcaacttgtcgtctcgcatatttcacacagcggcggtctcctgcacgat

SEQ ID NO: 890182 - DNA, 75 bp, synthetic construct
  source 1..75: mol_type = other DNA
tattgatgatcaactgttgattgacgtcgcgccggaatttagccagcagctgctgcgtgacaacatggatgcaac

SEQ ID NO: 890183 - DNA, 75 bp, synthetic construct
  source 1..75: mol_type = other DNA
ttacccggatcgccgtgacggcgcgctgaagtcgtcaattgcaaaatgggtgcttggtatgatgtcggaagggaa

SEQ ID NO: 890184 - DNA, 75 bp, synthetic construct
  source 1..75: mol_type = other DNA
agtaagttggcagcatcacccagttgtttatgtcttagcccaagtctgttaaagaaaaagttgaaaagcgaaaac

SEQ ID NO: 890185 - DNA, 75 bp, synthetic construct
  source 1..75: mol_type = other DNA
ggtaatattgatcttggcgtcgttggggtgggatatttttcaggtaatgttactcctgaaagttatcaaccaggt

SEQ ID NO: 890186 - DNA, 75 bp, synthetic construct
  source 1..75: mol_type = other DNA
cagaacttgtcaaagcgaaatcagcaaccaggggttggttaaccttggcactgttggagtgggatattttgccag

SEQ ID NO: 890187 - DNA, 75 bp, synthetic construct
  source 1..75: mol_type = other DNA
gagtgaacgtctgaaagagcaggaagccttttatgccgaatcggatgtgcagcgtgcggactggcataaagggct

SEQ ID NO: 890188 - DNA, 75 bp, synthetic construct
  source 1..75: mol_type = other DNA
cgtcatcacagaaagtgctgatggatatcagtcagcgaacaggtaccgcgttttcggataatgcggccctgtttg

SEQ ID NO: 890189 - DNA, 75 bp, synthetic construct
  source 1..75: mol_type = other DNA
gcgtgatgaatatgcagccatgccggaaacggtttccggtagtatcacgaaggtggaaaacgcctttatggcctg

SEQ ID NO: 890190 - DNA, 75 bp, synthetic construct
  source 1..75: mol_type = other DNA
cagatgttcactctggtactgatcgccttttttattgtttcaaccatcatcactctgcgcaatgtgcatgaagtc

SEQ ID NO: 890191 - DNA, 75 bp, synthetic construct
  source 1..75: mol_type = other DNA
gacttctcgcagagtcaacttggtcatagtaattttcgcgaatgtcagattagaaattcaaacttcgataattgt

SEQ ID NO: 890192 - DNA, 75 bp, synthetic construct
  source 1..75: mol_type = other DNA
aagcgagtggtgaatgtgtcgatttcagcaaaaatattcttgatacagttgacttctcgcagagtcaacttggtc

SEQ ID NO: 890193 - DNA, 75 bp, synthetic construct
  source 1..75: mol_type = other DNA
gggcagccgtagccggcgcacagtcaggtaagacgacggttgagaataatgcgttgtctgagcttgtgccgcctc

SEQ ID NO: 890194 - DNA, 75 bp, synthetic construct
  source 1..75: mol_type = other DNA
gcctgagtccggagcatatgagtgcgatgggggtaaaccgttatgccgtgccgggtatggagagactgccggctg

SEQ ID NO: 890195 - DNA, 75 bp, synthetic construct
  source 1..75: mol_type = other DNA
tcggtatcagaagtgaacagaaatattctccgcagactgcattatgtactgtggcagtcacaggctaaattaacg

SEQ ID NO: 890196 - DNA, 75 bp, synthetic construct
  source 1..75: mol_type = other DNA
ttatcactgtcttagcagcttacgtgaatcatcacaaaattaccgaagataactgtgttttgtcatgccctggct

SEQ ID NO: 890197 - DNA, 75 bp, synthetic construct
  source 1..75: mol_type = other DNA
ctgctgaaagacaaagagcagatgctgaacgccgttcgtcgggtgctgccgcgcaaccgtggactggcaggacag

SEQ ID NO: 890198 - DNA, 75 bp, synthetic construct
  source 1..75: mol_type = other DNA
taatgctttatgcttgctcaatactgatcaattttctttatcaagaatgacttcaattttcacattttacaaacc

SEQ ID NO: 890199 - DNA, 75 bp, synthetic construct
  source 1..75: mol_type = other DNA
cgaaaattgaaagcaggatacggattggtagaaagtaaagatagactggatagtgattttattgatttcgctaaa

SEQ ID NO: 890200 - DNA, 75 bp, synthetic construct
  source 1..75: mol_type = other DNA
tggttatggtccaggttcagtaggtctgtccgttgggcaagatggacttggtttttccttctctgttgggccaag

SEQ ID NO: 890201 - DNA, 75 bp, synthetic construct
  source 1..75: mol_type = other DNA
ttggttatggccctggttcagtaggtctgtccgttgggcaagatgggtttggtttttccttctctattgggccga

SEQ ID NO: 890202 - DNA, 75 bp, synthetic construct
  source 1..75: mol_type = other DNA
gcagagattttatagtgggaacatatacctactcagaaattaaagatcttaacttcatggctaaggaagagaaaa

SEQ ID NO: 890203 - DNA, 75 bp, synthetic construct
  source 1..75: mol_type = other DNA
ctgaacctgaatcacagagcgattctcttgtacgtcagccgcatacactgggccgctacggttcagcctgtaccc

SEQ ID NO: 890204 - DNA, 75 bp, synthetic construct
  source 1..75: mol_type = other DNA
catcggtctgatgaaagcggttgataaattcgaataccgccgtggttacaagttctccacctacgcaacctggtg

SEQ ID NO: 890205 - DNA, 75 bp, synthetic construct
  source 1..75: mol_type = other DNA
ggcactgtactttataactgccagcgcatctcgaatcggtatttttgataagaaacttaagctgagcaagatcgc

SEQ ID NO: 890206 - DNA, 75 bp, synthetic construct
  source 1..75: mol_type = other DNA
atcaaagcgcgccgttcgatctcctgcaaaagcagtacgcgggaagtcgcaaaagacgttgtagcgatcctttaa

SEQ ID NO: 890207 - DNA, 75 bp, synthetic construct
  source 1..75: mol_type = other DNA
gtttatcagagcctagttgcaccgattgagattaacatgcgggaaattgatgagcggcttagcgcgcgtcatttc

SEQ ID NO: 890208 - DNA, 75 bp, synthetic construct
  source 1..75: mol_type = other DNA
taaagcagtatttaccgaagaccagctaacgatttcctatcacgacctgttttaccgatatgaccgcgtcgcacc

SEQ ID NO: 890209 - DNA, 75 bp, synthetic construct
  source 1..75: mol_type = other DNA
aagatccgcaaagtgctgaagatcgccaaagagccaatctccatggaaacgccgatcggtgatgatgaagattcg

SEQ ID NO: 890210 - DNA, 75 bp, synthetic construct
  source 1..75: mol_type = other DNA
atgaagcaggtgaatgtttacatgaagaaaccgaatcaagtaacgccgaattggctacacctgaaacagtatttc

SEQ ID NO: 890211 - DNA, 75 bp, synthetic construct
  source 1..75: mol_type = other DNA
tgcactttgacccagatggtatatcagaggaaaatcacgagcttcttcataactttgtaaggtttattcatacta

SEQ ID NO: 890212 - DNA, 75 bp, synthetic construct
  source 1..75: mol_type = other DNA
acagcaggaatggaacggcaggcaacagatatttcggccgatgaagatacaaaacgcagaagggctgacaggatg

SEQ ID NO: 890213 - DNA, 75 bp, synthetic construct
  source 1..75: mol_type = other DNA
ctggcggacgttaacccggacctgattaatctgtatcagatgttagcggtcgtgccggatgaagtggaattgaag

SEQ ID NO: 890214 - DNA, 75 bp, synthetic construct
  source 1..75: mol_type = other DNA
gatgcatgtattgaaaaatataacactgggcaactcttcgggttagatggtataaaagcagataatccaataaaa

SEQ ID NO: 890215 - DNA, 75 bp, synthetic construct
  source 1..75: mol_type = other DNA
aaggccagcaccaggattaccagcgcacacagtatgaagtgtatgactaccccggacgtttcaagggggcccacg

SEQ ID NO: 890216 - DNA, 75 bp, synthetic construct
  source 1..75: mol_type = other DNA
ccgtaaaaggctatggtgctactatcaagtggatacctgacgtaatcgtgcccgttgccagaaaagccattagca

SEQ ID NO: 890217 - DNA, 75 bp, synthetic construct
  source 1..75: mol_type = other DNA
aaacgttgcttgtcaggcaaggctttaacaattcctaatagagacgatttattgattaaactagggaaggtgcga

SEQ ID NO: 890218 - DNA, 75 bp, synthetic construct
  source 1..75: mol_type = other DNA
tacaattgacaatactacagcgattgtatcaattgcattaggagctaatgtaattgaaaagcatgtcacactaga

SEQ ID NO: 890219 - DNA, 75 bp, synthetic construct
  source 1..75: mol_type = other DNA
ggttgtaaagaattagtcgttttacattgtgtaagtgggtatcctgctccagcagaagattataatcttgcaaca

SEQ ID NO: 890220 - DNA, 75 bp, synthetic construct
  source 1..75: mol_type = other DNA
tctgctggacaagggcagcagcatcacagcaaccggtggtcagggcggcggtgaagtgtatgtcggtggcggctg

SEQ ID NO: 890221 - DNA, 75 bp, synthetic construct
  source 1..75: mol_type = other DNA
accatcaacaaccataacatcacgtccacagcaggcaagctgaacatcaccctgctgggtgccggcagcaacacg

SEQ ID NO: 890222 - DNA, 75 bp, synthetic construct
  source 1..75: mol_type = other DNA
acatcaacggtacggtaaccggcggcaccatcacgggtggcaataccggagacggtaacggtgtgaacatcagtg

SEQ ID NO: 890223 - DNA, 75 bp, synthetic construct
  source 1..75: mol_type = other DNA
tcaatgaaagtatgttccttatgacaaacatccctcatcaggatccccccccaaagaaagatgttattcagaata

SEQ ID NO: 890224 - DNA, 75 bp, synthetic construct
  source 1..75: mol_type = other DNA
cacaacctttttcaatggagaaataaataatcttttcttaaaaaaatgtaatatatttggagtattcttcattaa

SEQ ID NO: 890225 - DNA, 75 bp, synthetic construct
  source 1..75: mol_type = other DNA
ttattaaaacattcacttcgaatttaggagataattacttttcttatatatatgacaacggtatgcctgagtata

SEQ ID NO: 890226 - DNA, 75 bp, synthetic construct
  source 1..75: mol_type = other DNA
taatacagaaagcgaggcacgggtagaagcaatgaataacggtgttttactttgcgaacaattattccccatgct

SEQ ID NO: 890227 - DNA, 75 bp, synthetic construct
  source 1..75: mol_type = other DNA
acgaccccgtgagtctggtttctggctttgtcagttttgttgatgggcaattgacactggaaccacgggtgatga

SEQ ID NO: 890228 - DNA, 75 bp, synthetic construct
  source 1..75: mol_type = other DNA
gcgctcgcggtgtttatcgtcggcaagccgctcatttcgctggtgtttggcgttaagtatctcgaagcgtatgac

SEQ ID NO: 890229 - DNA, 75 bp, synthetic construct
  source 1..75: mol_type = other DNA
ccagtgtcactattctggccagtcacacagcaaaagacggagcacagaaagggaatattaccgttaatgcggcaa

SEQ ID NO: 890230 - DNA, 75 bp, synthetic construct
  source 1..75: mol_type = other DNA
tcgtttccatcaagcagatggaaggcaaagatctcatgaacatgtctcctgttgagcaagtgacagcttatgcag

SEQ ID NO: 890231 - DNA, 75 bp, synthetic construct
  source 1..75: mol_type = other DNA
aggaacggcatcaggttacgatgcgacggctggaatgttccaggaaggcacagaggccaccggagccgccggata

SEQ ID NO: 890232 - DNA, 75 bp, synthetic construct
  source 1..75: mol_type = other DNA
tagctttatggagtgaattttttaggatatcaaccaatactttgtctttagtgtttttttgcgaaaagaaaatga

SEQ ID NO: 890233 - DNA, 75 bp, synthetic construct
  source 1..75: mol_type = other DNA
ccaaaacaggaccagatgatgcaggcctcaatctgttgcttactgaggcgcgtatggatgagcgcaaggatcgtg

SEQ ID NO: 890234 - DNA, 75 bp, synthetic construct
  source 1..75: mol_type = other DNA
ttaagcgctatcgaagcggccgagctgttgcaccgcgaagccatccgctatgaaaacgaatctcaggagctgcac

SEQ ID NO: 890235 - DNA, 75 bp, synthetic construct
  source 1..75: mol_type = other DNA
aagcttttttaactgaactgaagagcaaagatatagccagacctctaatacatgcactgaaaattgctagaggtg

SEQ ID NO: 890236 - DNA, 75 bp, synthetic construct
  source 1..75: mol_type = other DNA
aatggtgcgcgtcgcgcgaaccgtgacgccgaatccggcccatctgcaagtgtaccaggacaaatatcagctcta

SEQ ID NO: 890237 - DNA, 75 bp, synthetic construct
  source 1..75: mol_type = other DNA
ggcggtcgtggccaggctgccggccaagtgaacctaaagtacggtcaggagccgggtgtgcagttctatacccac

SEQ ID NO: 890238 - DNA, 75 bp, synthetic construct
  source 1..75: mol_type = other DNA
tagtaagtatataaaagagttatctggcattactatcgaaggtatcaatttcttcgatcaagaagatgcttatag

SEQ ID NO: 890239 - DNA, 75 bp, synthetic construct
  source 1..75: mol_type = other DNA
gcgggtaatgtgtcaggcgtcaccagccgggaagattacggacgggaaacacggcgggaataccggctggaccgg

SEQ ID NO: 890240 - DNA, 75 bp, synthetic construct
  source 1..75: mol_type = other DNA
ctcaagccaaattatgcgctgacgactcaggtagagtttaccgacccggagattgttgctgagtacatcacgtat

SEQ ID NO: 890241 - DNA, 75 bp, synthetic construct
  source 1..75: mol_type = other DNA
ggaatgctgcggtcggataaccgatgaagtcgcccgtcagacaggcttatgcgcaggcacccccgtctctggcgg

SEQ ID NO: 890242 - DNA, 75 bp, synthetic construct
  source 1..75: mol_type = other DNA
atcttttttaatttctttttctcattaggaccaaaaaaaataaaaacattgaaaaaaatccataaagttttatta

SEQ ID NO: 890243 - DNA, 75 bp, synthetic construct
  source 1..75: mol_type = other DNA
tatccgtggcctgttctgtggtggcacattatgcgatgaagcgatgtttactgccatggaaaaactctcggatgt

SEQ ID NO: 890244 - DNA, 75 bp, synthetic construct
  source 1..75: mol_type = other DNA
atacgtggagttgagcgacggcactttatcgtggttagggaacgccttgttctggatgcctctaccagaaccgcc

SEQ ID NO: 890245 - DNA, 75 bp, synthetic construct
  source 1..75: mol_type = other DNA
ttacgtagacatcaagattatcaatttcttactttaatattagaaaaaaatatttcatatcaatatattgataaa

SEQ ID NO: 890246 - DNA, 75 bp, synthetic construct
  source 1..75: mol_type = other DNA
aaatcccgcatttggacggctgatccgattggcacggcggacggcgaatggcggagcagacgctcgtccgggggc

SEQ ID NO: 890247 - DNA, 75 bp, synthetic construct
  source 1..75: mol_type = other DNA
tttgccaagccgctttggcttcggttattcatattgctggttattgaagtgatgtggattacgctggtgtcggta

SEQ ID NO: 890248 - DNA, 75 bp, synthetic construct
  source 1..75: mol_type = other DNA
tgataagccatttgaagtaattgccaattcatatgaagaataccgtactccagtgtatgcggtttctttctcgaa

SEQ ID NO: 890249 - DNA, 75 bp, synthetic construct
  source 1..75: mol_type = other DNA
agtgggagatgttaccaaagggcatacaatagaacagcttgatgcaattcaggagtttattaattataaatataa

SEQ ID NO: 890250 - DNA, 75 bp, synthetic construct
  source 1..75: mol_type = other DNA
cagagcaggcacaggctacagagcaggcacaggccacatcttcatatgatcctggtgttattaccagggcaaaca

SEQ ID NO: 890251 - DNA, 75 bp, synthetic construct
  source 1..75: mol_type = other DNA
attgcgatgatgaccgtattgaggctgttaaggctgttttgcgtagactggcaggcaactctccggtaactccgg

SEQ ID NO: 890252 - DNA, 75 bp, synthetic construct
  source 1..75: mol_type = other DNA
caaagagcttacgcctgagattatgcgcaaccaggctgccgaatccaatcgcggtaatgagtggaccggcaatcc

SEQ ID NO: 890253 - DNA, 75 bp, synthetic construct
  source 1..75: mol_type = other DNA
ttgttcttactgatatgactggaggagtgactatttattatgatcctgaaacaggtgattcaatgacttttgata

SEQ ID NO: 890254 - DNA, 75 bp, synthetic construct
  source 1..75: mol_type = other DNA
atgataaacgtcggccgctaccgctggtcatcccgatgctgttttatcacggtagccgtagtcctggtccctgtg

SEQ ID NO: 890255 - DNA, 75 bp, synthetic construct
  source 1..75: mol_type = other DNA
ccgaaacttaaatggctttgacgtgatattcatcgccggaggctttgtaaagcggaaataccttgtagataaaat

SEQ ID NO: 890256 - DNA, 75 bp, synthetic construct
  source 1..75: mol_type = other DNA
cttcagtaagaaagtataagcattttgacaaggcattatcctgtgcatcggaatatgttctgttgtcagaggcca

SEQ ID NO: 890257 - DNA, 75 bp, synthetic construct
  source 1..75: mol_type = other DNA
gaaattgcttattgccagatgggaactgacagcagaacaggctgttacacagcagttaaaaaagcgtacagcctg

SEQ ID NO: 890258 - DNA, 75 bp, synthetic construct
  source 1..75: mol_type = other DNA
cggtcatggtcgcactgatcctgtgggcgaaagccccgactaccgcacattattcagcaatctttccgatcagga

SEQ ID NO: 890259 - DNA, 75 bp, synthetic construct
  source 1..75: mol_type = other DNA
tcatcctgaaagaacgcgcgcggcaggcgattgagaacccgcttaatcagcccgaacagggcacacattatcagg

SEQ ID NO: 890260 - DNA, 75 bp, synthetic construct
  source 1..75: mol_type = other DNA
atgcaacccagccccgctatgcaggcagtaattgagcaggtttatcatatttttcgtcgttatccggtgccgcag

SEQ ID NO: 890261 - DNA, 75 bp, synthetic construct
  source 1..75: mol_type = other DNA
gaaataaaaagagataactggcttacaaatagcgaatggtataacaaaggaaataatttctttattcttgagaat

SEQ ID NO: 890262 - DNA, 75 bp, synthetic construct
  source 1..75: mol_type = other DNA
tgccatacttcagatgataaagacgtcatcgcaattgatggaaaaacgctccggcactcttatgacaagagtcgc

SEQ ID NO: 890263 - DNA, 75 bp, synthetic construct
  source 1..75: mol_type = other DNA
tatatttacgtagtgattgaacatcagagccgcgaggatatccatatggcctttcgcctgatgcgatattccatg

SEQ ID NO: 890264 - DNA, 75 bp, synthetic construct
  source 1..75: mol_type = other DNA
cgccggtaaacaaaccgttaccgcacggaaaggcgcggcaattttcgattcggcgcaatctttcgccatgatccg

SEQ ID NO: 890265 - DNA, 75 bp, synthetic construct
  source 1..75: mol_type = other DNA
gctacaaagtcatattgtatcttcctcagaagcatatgtcacaatgttattacaacacctggcatgttgtatgat

SEQ ID NO: 890266 - DNA, 75 bp, synthetic construct
  source 1..75: mol_type = other DNA
ttggtgtgaatggagacataaaaatagcaaatatactttttaataacaatgaaattaaaagagacaactggctta

SEQ ID NO: 890267 - DNA, 75 bp, synthetic construct
  source 1..75: mol_type = other DNA
gtccgaatccagaatagagaaaggtgatgcattgaaggaacaggccaccgaacaggcacaggccaccgaacaggc

SEQ ID NO: 890268 - DNA, 75 bp, synthetic construct
  source 1..75: mol_type = other DNA
tgctgtcgacgctggcagacgggcgggtttatccgtatgtagtgccgctaggcagcgacggacttcctgcagttt

SEQ ID NO: 890269 - DNA, 75 bp, synthetic construct
  source 1..75: mol_type = other DNA
cgagatggcggaatacctcgggttgagtgttgaggcgctcattcagcgccacaccggctctttgtggcaggtggc

SEQ ID NO: 890270 - DNA, 75 bp, synthetic construct
  source 1..75: mol_type = other DNA
agttatcgagatctcgaagtactttcgtacggggaactaacggaaaatgttcccgttaatattctgaaaactatt

SEQ ID NO: 890271 - DNA, 75 bp, synthetic construct
  source 1..75: mol_type = other DNA
gtcagttagccgacgacagtcgtcatgagggggattccattcgcttcctctatgcgaaatcaggtgatgctgcca

SEQ ID NO: 890272 - DNA, 75 bp, synthetic construct
  source 1..75: mol_type = other DNA
tcgtatttgaatcgacaacagaaaatacaggtgataaatcaggtgggttaatgccctgttttaaccaggtactcc

SEQ ID NO: 890273 - DNA, 75 bp, synthetic construct
  source 1..75: mol_type = other DNA
tatgcttaaattcaggtttcctattttggactaatatcttagtatacctgctatccatgttccttagaggttgga

SEQ ID NO: 890274 - DNA, 75 bp, synthetic construct
  source 1..75: mol_type = other DNA
acatatgtaagtatgaaaaaagaggatttagctactgctaacgtggcacttaattcagtactgataattgatgat

SEQ ID NO: 890275 - DNA, 75 bp, synthetic construct
  source 1..75: mol_type = other DNA
cgggaatttgtaggcctgataagacgcgcaagcgtcgcatcaggcatctggcaccgttgccggatgcggcgcgag

SEQ ID NO: 890276 - DNA, 75 bp, synthetic construct
  source 1..75: mol_type = other DNA
ctcatcgcctacggcataattttcagcggagttcaggcgaacgccgttgcccgagccctgagttttcttttgatt

SEQ ID NO: 890277 - DNA, 75 bp, synthetic construct
  source 1..75: mol_type = other DNA
cgcctgaaatagaggacagaatcagagatggtgtcaggcctaccgctggcggtacttttcttaatctcgatgcat

SEQ ID NO: 890278 - DNA, 75 bp, synthetic construct
  source 1..75: mol_type = other DNA
agtggctcgccgcagtcggccagattgagcaatgcgtcctttgcggagcgtggggcgtacaggtagcacaccgca

SEQ ID NO: 890279 - DNA, 75 bp, synthetic construct
  source 1..75: mol_type = other DNA
ttaatggggcattatgatcgagtagaagaatatatgactgcccttcgccctaataatcaaaccattcgaaagatt

SEQ ID NO: 890280 - DNA, 75 bp, synthetic construct
  source 1..75: mol_type = other DNA
ttagggcgagcactggatcgcgtattaacgtggaattattacatgctgccaatgtggtacatggcggaagaccgt

SEQ ID NO: 890281 - DNA, 75 bp, synthetic construct
  source 1..75: mol_type = other DNA
gtatgcgacacagcaaaaggaacaatcaaactagatgaaaacaaaggtgtacttcggtacaccttatcgaaagac

SEQ ID NO: 890282 - DNA, 75 bp, synthetic construct
  source 1..75: mol_type = other DNA
aaggatcaccgccccgtgttctttaccgggcagtgtcagttgatgatgcacaggcctgaaaaggcaaggcaatgc

SEQ ID NO: 890283 - DNA, 75 bp, synthetic construct
  source 1..75: mol_type = other DNA
atggacaacgatgccagtaatgagcatgtgatggagatgctctggaaagtgattagtgagggcggtacgttacag

SEQ ID NO: 890284 - DNA, 75 bp, synthetic construct
  source 1..75: mol_type = other DNA
gcacaggccacagagcaagcacaggtcgcagcgcaggccacatcttcatatgatcctggtgttattaccagggca

SEQ ID NO: 890285 - DNA, 75 bp, synthetic construct
  source 1..75: mol_type = other DNA
cgaacctgaatagcaaaaaagaatctgtttattattgtaagtccattggcattgatcgccttagtgatttatcgg

SEQ ID NO: 890286 - DNA, 75 bp, synthetic construct
  source 1..75: mol_type = other DNA
tgtttatgattgtaagtccgttggcattgatcgtcttagtgatttgtcggcaaaaatagcttgtgataaagattc

SEQ ID NO: 890287 - DNA, 75 bp, synthetic construct
  source 1..75: mol_type = other DNA
cgttatgacgtaacccgtcatgtcagcctgaccgcggaggccggctttgaaacgcgtaagagcatcttcgtgtcc

SEQ ID NO: 890288 - DNA, 75 bp, synthetic construct
  source 1..75: mol_type = other DNA
aatacgcgaatcttaaacggcgcagagatgcagatttacccgcaactggcgacttcagcaatgaaccgcatacag

SEQ ID NO: 890289 - DNA, 75 bp, synthetic construct
  source 1..75: mol_type = other DNA
aagaaagaatgtgctcttgtagcggcagaacgggatatgaatattattctgcgccctgagaaataccaacagatg

SEQ ID NO: 890290 - DNA, 75 bp, synthetic construct
  source 1..75: mol_type = other DNA
tcgaagctaatacgctactttccgggctgggctttgagagcggcgggcttgctgccgcgcacgccattcataacg

SEQ ID NO: 890291 - DNA, 75 bp, synthetic construct
  source 1..75: mol_type = other DNA
gaagatatattcagggcgcgggagctattgagcaatgtttaggtgaggagttatcccgttttggcaacaaggcaa

SEQ ID NO: 890292 - DNA, 75 bp, synthetic construct
  source 1..75: mol_type = other DNA
cacaactgaataaaacgggggatgcgcgttttgatgtcaggcagcatctgaaaaaaccgtggaacatgctggctg

SEQ ID NO: 890293 - DNA, 75 bp, synthetic construct
  source 1..75: mol_type = other DNA
atacaggagtcaggaaccagcatattaaaaaatgagttagaaaacagtgaggacggtgcgggtcaaataggcttt

SEQ ID NO: 890294 - DNA, 75 bp, synthetic construct
  source 1..75: mol_type = other DNA
atgagcgcacgttcacgggcactgactcccctcagcgcagagcaacaggccgccatgcaggctgtgctgtcacag

SEQ ID NO: 890295 - DNA, 75 bp, synthetic construct
  source 1..75: mol_type = other DNA
tggtaaagttatccctttcatacgttactatgcggatggtataaagcgcgatgcaaaaaaggccgcttttgtatc

SEQ ID NO: 890296 - DNA, 75 bp, synthetic construct
  source 1..75: mol_type = other DNA
aactaaaagtccgaattataatccaggagctgcaaatgatactcatataccattgcctacaggaactattccatg

SEQ ID NO: 890297 - DNA, 75 bp, synthetic construct
  source 1..75: mol_type = other DNA
cagatatacagcaaaaatttcccatcactcaatctgacaaataaaacagtttttgacccgtgtacaaatataaaa

SEQ ID NO: 890298 - DNA, 75 bp, synthetic construct
  source 1..75: mol_type = other DNA
ttttcctttgttgttcgaaattgaagtgagttcatgtacagggaataatactaattgtaatagcgtccgctttaa

SEQ ID NO: 890299 - DNA, 75 bp, synthetic construct
  source 1..75: mol_type = other DNA
taatgataatgattttattcaagcaattgaatctatcttactaggagattcaattgagctagataaaattcaact

SEQ ID NO: 890300 - DNA, 75 bp, synthetic construct
  source 1..75: mol_type = other DNA
gtgctaaagctgaaggggtacatatgggaaggcctgtaaaagcttcttcagaggctgtacagacgcttatttcac

SEQ ID NO: 890301 - DNA, 75 bp, synthetic construct
  source 1..75: mol_type = other DNA
cctgtaaagcctgttattgtcccaaaacagctgataatggataaaaaatatccttcccaaaaaaaatatcaaact

SEQ ID NO: 890302 - DNA, 75 bp, synthetic construct
  source 1..75: mol_type = other DNA
atgcctactcaagataaaaattcgcagaatacagtgagccttgttattgatggcaaaatccatagtgcatggagc

SEQ ID NO: 890303 - DNA, 75 bp, synthetic construct
  source 1..75: mol_type = other DNA
atgcctactcaagataaagattcgcagaatacagtgagcctggttattgatggcaaaatccacagtgcatggagc

SEQ ID NO: 890304 - DNA, 75 bp, synthetic construct
  source 1..75: mol_type = other DNA
agtggccggcgctgatcgctcgcctccaatcagccctcaacgacggcatcgcaccggacagcgcacatgcccgcc

SEQ ID NO: 890305 - DNA, 75 bp, synthetic construct
  source 1..75: mol_type = other DNA
agacagatatactaaagctggtgtgtatactccctataatgatattggttacttggtatatgatgtcgtatatgg

SEQ ID NO: 890306 - DNA, 75 bp, synthetic construct
  source 1..75: mol_type = other DNA
gcaacatcaggtgatgagaaatcgggcggtttaattatagatgtcgcatccaccagtagtggtgttggacgcgta

SEQ ID NO: 890307 - DNA, 75 bp, synthetic construct
  source 1..75: mol_type = other DNA
acacgttctaaatgaaatattaaaaagtaaaaatttattcaatgaagcggaaatagctcatgccataaaatatgt

SEQ ID NO: 890308 - DNA, 75 bp, synthetic construct
  source 1..75: mol_type = other DNA
ttcgtttatcacgtagtcaaataaacaatattgctaaagaaatggagaagctaggaattaaagtaataaggaaag

SEQ ID NO: 890309 - DNA, 75 bp, synthetic construct
  source 1..75: mol_type = other DNA
aatgcgcttaactattttcaacgtagttatgatgaaaataaagaatatatctttacccgtaaccgtgcatgtatg

SEQ ID NO: 890310 - DNA, 75 bp, synthetic construct
  source 1..75: mol_type = other DNA
aattggccaaagttctggcattaaaatttaacagcggtgactggagggagctttttgctgttaccgattgtgaag

SEQ ID NO: 890311 - DNA, 75 bp, synthetic construct
  source 1..75: mol_type = other DNA
ctgtttgctgttacagattgtgaagacgttccggaaggactaaatcaattctaccggcatgttcactgggacaac

SEQ ID NO: 890312 - DNA, 75 bp, synthetic construct
  source 1..75: mol_type = other DNA
ctcaatacaatccgtttatgcgaacagggattgctaaacttggggaaggaactcagtttggtaaaaatagttttt

SEQ ID NO: 890313 - DNA, 75 bp, synthetic construct
  source 1..75: mol_type = other DNA
acctgaaggcgcagtctgcgggcaggcaccggataagtgaagagactgaccagtatgccggaggccaccggctga

SEQ ID NO: 890314 - DNA, 75 bp, synthetic construct
  source 1..75: mol_type = other DNA
cagggccgacgggccattgaataccactaccccgacgaacacaccgtcatccgctgtatcctgccaccggaagat

SEQ ID NO: 890315 - DNA, 75 bp, synthetic construct
  source 1..75: mol_type = other DNA
ggccattgaataccactaccccgacgaacacaccgtcatccgctgtatcctgccaccggaagatgaacgcgacag

SEQ ID NO: 890316 - DNA, 75 bp, synthetic construct
  source 1..75: mol_type = other DNA
gtaacaagctagctggttgccttaatttgatattatcatctgcgttaacaaaaatgattgattctgcagattctc

SEQ ID NO: 890317 - DNA, 75 bp, synthetic construct
  source 1..75: mol_type = other DNA
gcgatttgccatatgcaagagatgtgcttaacaattattcaaatgtagaatatataaatcatgatgatgccagta

SEQ ID NO: 890318 - DNA, 75 bp, synthetic construct
  source 1..75: mol_type = other DNA
ggtgatattattcatgaatggcaaaaaacagatgtatcaggaaagatatatattgttcgtttatggctgaaagcg

SEQ ID NO: 890319 - DNA, 75 bp, synthetic construct
  source 1..75: mol_type = other DNA
attacttaaaagatgttgataatgtaaaattaattccacctcaagaatatcttccatttgtttatttaatggaac

SEQ ID NO: 890320 - DNA, 75 bp, synthetic construct
  source 1..75: mol_type = other DNA
aataactcgattttttcaaggcaacggctatcaatcaacttcgccagtttgtccgtacattttatgacaactgtc

SEQ ID NO: 890321 - DNA, 75 bp, synthetic construct
  source 1..75: mol_type = other DNA
tttagttgctattgtgtctgtgtatatggactggaaaaacgtaaaatatattattgatggtggaaaaggattttc

SEQ ID NO: 890322 - DNA, 75 bp, synthetic construct
  source 1..75: mol_type = other DNA
cagaccgcgatttactccgccggtgagcatctggagctctgctgtggtaaggcaaggctggtgctgacgaaggac

SEQ ID NO: 890323 - DNA, 75 bp, synthetic construct
  source 1..75: mol_type = other DNA
ggtggcaagtgaactgcacggcgaacagccacaggcggtgccaggacggcagggagcggggacggcgctggagaa

SEQ ID NO: 890324 - DNA, 75 bp, synthetic construct
  source 1..75: mol_type = other DNA
tagcaaagaaggcatataaaataatatgtgggaataattaccttgccgaatggtttagaagatataataataatg

SEQ ID NO: 890325 - DNA, 75 bp, synthetic construct
  source 1..75: mol_type = other DNA
tgcctaggtttcatactctacagtaatactaaaagtgaatggcgtgatgaacttgttaagtcaataaaagagtta

SEQ ID NO: 890326 - DNA, 75 bp, synthetic construct
  source 1..75: mol_type = other DNA
gggcctgcttactctaactctgaccgtaccgacaatcaggttcacaaaggtactcataacactcgttatggagat

SEQ ID NO: 890327 - DNA, 75 bp, synthetic construct
  source 1..75: mol_type = other DNA
atgaatattccgggtgaaacccgcaccatcacactgtacacacctgtcactctggggggcggggctgtgctggaa

SEQ ID NO: 890328 - DNA, 75 bp, synthetic construct
  source 1..75: mol_type = other DNA
accaaaagcggtcaaggctgcatacgacctagcagccggcaaggcgccagccagccacactcacccgtggagtca

SEQ ID NO: 890329 - DNA, 75 bp, synthetic construct
  source 1..75: mol_type = other DNA
aggacgatctagggcctgttcgtgttgatttttttgacagtgaaagtcctggatgttgggttcatccggtgcagc

SEQ ID NO: 890330 - DNA, 75 bp, synthetic construct
  source 1..75: mol_type = other DNA
gataccgtcggcggcaccgtgaaagaggttctccgtggcgcgaatgttcaggttgactgggtgtacgacgacacg

SEQ ID NO: 890331 - DNA, 75 bp, synthetic construct
  source 1..75: mol_type = other DNA
tcaagggtgcccacgggcagaactttgcccgctggcagatggacggctggcgaaacaatgcagaaaccgcgcggg

SEQ ID NO: 890332 - DNA, 75 bp, synthetic construct
  source 1..75: mol_type = other DNA
gcctgtaaagttattcttaaagagaaagcgccggagattgagtttagctacaccaccgatcctgaagtggcgttc

SEQ ID NO: 890333 - DNA, 75 bp, synthetic construct
  source 1..75: mol_type = other DNA
cggcgggcaagctggaaattgacgaacatgcgtcatacatcgtcgatctggcggcggcaattgccttcaacactc

SEQ ID NO: 890334 - DNA, 75 bp, synthetic construct
  source 1..75: mol_type = other DNA
taattccacactgaatgatggttatcaaattgttcaagtggagggggcagcaaaccaaactaccattaataatgg

SEQ ID NO: 890335 - DNA, 75 bp, synthetic construct
  source 1..75: mol_type = other DNA
ttctactccattcgtcagtggccagcataccgatggtaaaattacaaaaggcaataaccaccttgaaatacgcca

SEQ ID NO: 890336 - DNA, 75 bp, synthetic construct
  source 1..75: mol_type = other DNA
cattctgccgtatatggctttccgtccaattatcaagcacccacgcctgatggaaagtagcctgtttacgccgat

SEQ ID NO: 890337 - DNA, 75 bp, synthetic construct
  source 1..75: mol_type = other DNA
gataatgatggcacagtgagagtaaaagaacttcctgaaaatggcttgggttattctgcctggacagttgaagag

SEQ ID NO: 890338 - DNA, 75 bp, synthetic construct
  source 1..75: mol_type = other DNA
tctcaataaagccattctgtgtaaatcccgattgccaaaaaatcgaattgaattgttccgggtgctacagagttt

SEQ ID NO: 890339 - DNA, 75 bp, synthetic construct
  source 1..75: mol_type = other DNA
aaacatgggatattaaagatattgattcaggtaactatgccgcattcgtatatcttattcagtttgatgaatctg

SEQ ID NO: 890340 - DNA, 75 bp, synthetic construct
  source 1..75: mol_type = other DNA
cctatactacggttggtacaaataataatagcggtcttgatattaaaacccgccgcctgagtaaactggtgacag

SEQ ID NO: 890341 - DNA, 75 bp, synthetic construct
  source 1..75: mol_type = other DNA
tatggaaccacgaataatacgaaaattaccgccaccggggaacagcatgttaaaaaatatggcgtaagtaataat

SEQ ID NO: 890342 - DNA, 75 bp, synthetic construct
  source 1..75: mol_type = other DNA
cgcgcaggtatgttgccagtgctaatgagaacgacgaccaaccggattattcatgcacgttccaggaaaagcagt

SEQ ID NO: 890343 - DNA, 75 bp, synthetic construct
  source 1..75: mol_type = other DNA
aaagctgcgtcgtccaggcgtcaggctgagctgtatttcatttctacggagctggtctttcgtctcgaacgttac

SEQ ID NO: 890344 - DNA, 75 bp, synthetic construct
  source 1..75: mol_type = other DNA
ccaaagggaaatcagttgaatagagagcatgcgttctggcatgtaagtggaattcaccctaatcccctgggaatg

SEQ ID NO: 890345 - DNA, 75 bp, synthetic construct
  source 1..75: mol_type = other DNA
caacattcgctagctactcacattcacccattagaaaacagagagttacgccaatatactgctgtttgcatccgg

SEQ ID NO: 890346 - DNA, 75 bp, synthetic construct
  source 1..75: mol_type = other DNA
gctgggacgccatttatcacaatcgtgcggatgtggttgttggcgcccctcactccgtgccatccagtgatggaa

SEQ ID NO: 890347 - DNA, 75 bp, synthetic construct
  source 1..75: mol_type = other DNA
tgcttgacaatgcaatgaaaagcaaagattcaaaaatgattgattttttattaaaaaatggagcggtatcaggca

SEQ ID NO: 890348 - DNA, 75 bp, synthetic construct
  source 1..75: mol_type = other DNA
aaaacgctgcttttctccctcgatgacacgctggttaataacgcgctgcaaacactgaataaaacccgcccggca

SEQ ID NO: 890349 - DNA, 75 bp, synthetic construct
  source 1..75: mol_type = other DNA
aaaacatgccgacgcttcgacctgaagaattaccaaagctgatgcgttctttagtcatgtcaaatctgtctatcc

SEQ ID NO: 890350 - DNA, 75 bp, synthetic construct
  source 1..75: mol_type = other DNA
agatatacgcattatggtttgtcgggacgtttctgctcggcatagcaatcaactcgctgacgaaaaaagaacatc

SEQ ID NO: 890351 - DNA, 75 bp, synthetic construct
  source 1..75: mol_type = other DNA
ctgctacaacctgatacggcgcgccatttaagctctcagcaactggccaacgaagccggagtcagtccagcgtcg

SEQ ID NO: 890352 - DNA, 75 bp, synthetic construct
  source 1..75: mol_type = other DNA
gaactgaaagcgatcatttctgatgtgaacgcttccgacgaagatcgttggaacgctgttctcaagctgcagact

SEQ ID NO: 890353 - DNA, 75 bp, synthetic construct
  source 1..75: mol_type = other DNA
gaaactttcaatcgccttatggaagaactggctcttaatcagactgagttagttcataaagcgctgcgctacctg

SEQ ID NO: 890354 - DNA, 75 bp, synthetic construct
  source 1..75: mol_type = other DNA
aagacggaatgaatagaagaggaaaacgatatagcgggaatagaatctattttggattcatcaataaaattaaag

SEQ ID NO: 890355 - DNA, 75 bp, synthetic construct
  source 1..75: mol_type = other DNA
agcagtgaagccactaagctcacgggcgcaagccgtgctgaatacactgaaatcggcaatgccttccgcattgga

SEQ ID NO: 890356 - DNA, 75 bp, synthetic construct
  source 1..75: mol_type = other DNA
tttctccagaaaaacgcgagtctgttctcatgccccggatgcccaccccccacgcaaaaccaacttttttctgat

SEQ ID NO: 890357 - DNA, 75 bp, synthetic construct
  source 1..75: mol_type = other DNA
tccccaaatctacatggacgcgatggcctacgattacataagccctacgcgttgggatgaggggattaatgcgct

SEQ ID NO: 890358 - DNA, 75 bp, synthetic construct
  source 1..75: mol_type = other DNA
accccaagtctacatggacgctatggcttacgattacataagccccacgcgttgggatgaggggattaatgcgct

SEQ ID NO: 890359 - DNA, 75 bp, synthetic construct
  source 1..75: mol_type = other DNA
ccgagggctactataccctcaatgagtgggcatcgcggcgcaacagccctgaagacttttgggaaacaggtaacc

SEQ ID NO: 890360 - DNA, 75 bp, synthetic construct
  source 1..75: mol_type = other DNA
cgcatgtgggttaccgtgttttattcagagtcatgaatgtaaaaggtaagccagcaccatttggcgcgatggcat

SEQ ID NO: 890361 - DNA, 75 bp, synthetic construct
  source 1..75: mol_type = other DNA
tctggcgcacagcgaaggggtaacgttaagtcaggagttaggtgaaaccatcgcgctggttaaagcaccaggcgc

SEQ ID NO: 890362 - DNA, 75 bp, synthetic construct
  source 1..75: mol_type = other DNA
tttgatgatacggacaccagtttgcgtctggttggctatcgttattccactgaaggctactataccctcaacgaa

SEQ ID NO: 890363 - DNA, 75 bp, synthetic construct
  source 1..75: mol_type = other DNA
ttaatcgtgagcaagtgcaaaaaatgttaggcgggcttagcaagtccgccttttttaagctcgttaaaaaatgga

SEQ ID NO: 890364 - DNA, 75 bp, synthetic construct
  source 1..75: mol_type = other DNA
ccccctcacttatcccgaaaaaaccgggggagcgggttaaaaccgatcgccgtgatgccatcagacttgtgcgtt

SEQ ID NO: 890365 - DNA, 75 bp, synthetic construct
  source 1..75: mol_type = other DNA
gaggcattccgggatttggcccgggcatgggcatctgcccgcgatgatttacggcatgcaaggcaacgtctgaaa

SEQ ID NO: 890366 - DNA, 75 bp, synthetic construct
  source 1..75: mol_type = other DNA
gacacatgctcgtgcgaattttagccatgatgatacagaaacgggtcagtcatatcgctttctctattcaaaacg

SEQ ID NO: 890367 - DNA, 75 bp, synthetic construct
  source 1..75: mol_type = other DNA
gtggatgaaacggtctgtattgatcctgagccacgcattgaaggctcatcctggcaactggacagcgataaactg

SEQ ID NO: 890368 - DNA, 75 bp, synthetic construct
  source 1..75: mol_type = other DNA
gcttatgattacatcagccccacgcgttgggatgaggggattaacgcgctcaccatcaactacgatttttctggt

SEQ ID NO: 890369 - DNA, 75 bp, synthetic construct
  source 1..75: mol_type = other DNA
gcattcgaagattatattaaagatgttttggaagattggattgacatgctgaaccaaaataacggatgcctttcg

SEQ ID NO: 890370 - DNA, 75 bp, synthetic construct
  source 1..75: mol_type = other DNA
tagcatcgttaagagactcacaagagatatggagcattattgaagggtttgaagataacatcaacgaaaaatatt

SEQ ID NO: 890371 - DNA, 75 bp, synthetic construct
  source 1..75: mol_type = other DNA
ctggtgtcagtggttttcaggaaggaagcaagaaagagccagatttccagaagaatcactgactgctaccaaccc

SEQ ID NO: 890372 - DNA, 75 bp, synthetic construct
  source 1..75: mol_type = other DNA
ggcattacgatgcgtcggaccgtatcacccggcgcacggtgaacggtgaaccggcggagcagtggcagtatgacg

SEQ ID NO: 890373 - DNA, 75 bp, synthetic construct
  source 1..75: mol_type = other DNA
gcgataatccccacccgtcagccgtttaatattggggcgctgagtgataatgagcttaaggtgtaccggttaatt

SEQ ID NO: 890374 - DNA, 75 bp, synthetic construct
  source 1..75: mol_type = other DNA
caggcggcaacagccgtcctgtcacagtgtcgtcaggccggtgttgctgttgtcagggatgtcagcagcagacgg

SEQ ID NO: 890375 - DNA, 75 bp, synthetic construct
  source 1..75: mol_type = other DNA
actgacgccgatcgtgaaggcgaaattatcgcaagggaactgctggattattgtggttataccggcgttgtgcgc

SEQ ID NO: 890376 - DNA, 75 bp, synthetic construct
  source 1..75: mol_type = other DNA
ttcagagaacgattggacttgcaatccataaatgccaatgatatttcaataccattggcatccgtttgctttata

SEQ ID NO: 890377 - DNA, 75 bp, synthetic construct
  source 1..75: mol_type = other DNA
cgaaaaacagacgatcagcttatccgtgggccaaccgattaccccactaaacctcaatctttacgccaacctgct

SEQ ID NO: 890378 - DNA, 75 bp, synthetic construct
  source 1..75: mol_type = other DNA
tacagcaaacaagtggatgccaccaacagcacgatttcgctcgccgcttatcgcttctcagatcgtcattttcac

SEQ ID NO: 890379 - DNA, 75 bp, synthetic construct
  source 1..75: mol_type = other DNA
ggagagctgctaccggtatgatgataccggtcgggtgacggagcaggtcaacccggaggggctggactaccgctt

SEQ ID NO: 890380 - DNA, 75 bp, synthetic construct
  source 1..75: mol_type = other DNA
gcggcgcagcacagttcgcagccgctaagcgcgctctggcaggtgctgccggaagatgttcgcctgagtccgcat

SEQ ID NO: 890381 - DNA, 75 bp, synthetic construct
  source 1..75: mol_type = other DNA
gaggctgaaggcgcagacggatgcggcggggcggcggacggagtaccggctgcatatggcgtctggaaagctgac

SEQ ID NO: 890382 - DNA, 75 bp, synthetic construct
  source 1..75: mol_type = other DNA
agtggcgaaatccgatcccgctgtggccccggtactgaatcagctggacaggaagtttgtctcgcgtgtctggaa

SEQ ID NO: 890383 - DNA, 75 bp, synthetic construct
  source 1..75: mol_type = other DNA
tcggggtttttgggtctgtaagtctgtatggcagtcgtgatgaataccgtggcaacagagcaaaacaagattcat

SEQ ID NO: 890384 - DNA, 75 bp, synthetic construct
  source 1..75: mol_type = other DNA
tgctctggtgaatctgctggaggttaccggcgcagttttcctgaatcctgaaaaggtattaagagatgaaaatac

SEQ ID NO: 890385 - DNA, 75 bp, synthetic construct
  source 1..75: mol_type = other DNA
atagtggtattgacccaaacaatagggatatctctccatgggtatggggaagaaggagctttcttaatggaagga

SEQ ID NO: 890386 - DNA, 75 bp, synthetic construct
  source 1..75: mol_type = other DNA
gccggacaacattacgccttaatcagtctctgggatctctggggtatatgagcctttacggtagccgtgatgagt

SEQ ID NO: 890387 - DNA, 75 bp, synthetic construct
  source 1..75: mol_type = other DNA
gccttatgggatgatggtattcctgcttttctgctgaactggcaggcaaataccagtcgttcagaatatcgtgga

SEQ ID NO: 890388 - DNA, 75 bp, synthetic construct
  source 1..75: mol_type = other DNA
ggatcacgtaatcgtaatttaggggtatccgcgaaccataatggtaagacagaaaacagtattaatctgtggatg

SEQ ID NO: 890389 - DNA, 75 bp, synthetic construct
  source 1..75: mol_type = other DNA
gggcttgtgtattggctatatcgaaaacgccatgcattccggtgtactttctacggcgttacgtacgttacgtgt

SEQ ID NO: 890390 - DNA, 75 bp, synthetic construct
  source 1..75: mol_type = other DNA
caggcgctggatgatgttgcccgggggaaaatctcactggaggcgtttatggagaaacagcatcagtggatcagg

SEQ ID NO: 890391 - DNA, 75 bp, synthetic construct
  source 1..75: mol_type = other DNA
tttcgctgggaacgttgcaggaagcctgttcccggaagtttggcatgggggctcagaccgttctggatatcgcac

SEQ ID NO: 890392 - DNA, 75 bp, synthetic construct
  source 1..75: mol_type = other DNA
ggttgcaattaagtttttccagcgctggctcactgcccttaacatgcgtgggaagttgtatcccgatctgatccc

SEQ ID NO: 890393 - DNA, 75 bp, synthetic construct
  source 1..75: mol_type = other DNA
ggaaagtggaagaggcgacgcagatcctgcatatcaatcacggcgaaatgcagatcacctcgtcaccgaaaaaat

SEQ ID NO: 890394 - DNA, 75 bp, synthetic construct
  source 1..75: mol_type = other DNA
tatgacctggcgcaccttgttgacgctgctgtcggtgcgtaacggcaaacgtctggctgatggtattcgggggcg

SEQ ID NO: 890395 - DNA, 75 bp, synthetic construct
  source 1..75: mol_type = other DNA
gtgaagttaccgcttaatgtcgtcacagaaaccgcaaaacagcttaatttatctgaaggaatggatgcggaaaaa

SEQ ID NO: 890396 - DNA, 75 bp, synthetic construct
  source 1..75: mol_type = other DNA
aatattataaataaacataacttttcttcgccatctttcttttggcccttcttaattgattatttatcacaaaat

SEQ ID NO: 890397 - DNA, 75 bp, synthetic construct
  source 1..75: mol_type = other DNA
tctcttcctgctgatgttgagtgtggcgacttgatcaccagcacgggcgctaaatatgaatcaggagatgatatc

SEQ ID NO: 890398 - DNA, 75 bp, synthetic construct
  source 1..75: mol_type = other DNA
acgctgaggcgatacaggctgtcgtcctcaaagcccccagacacgaacggatgaaggaaatcagcgagagcatcg

SEQ ID NO: 890399 - DNA, 75 bp, synthetic construct
  source 1..75: mol_type = other DNA
aaaaagaagcgctgtttcgccctaagccttctcctgagttagggaaggtgcgaataagcaggtcatttcttccca

SEQ ID NO: 890400 - DNA, 75 bp, synthetic construct
  source 1..75: mol_type = other DNA
gtgcgtgggctgtggttattccggggtacgggatggtgccggtaagaatgctccggtctgggtgaaggtgaatcc

SEQ ID NO: 890401 - DNA, 75 bp, synthetic construct
  source 1..75: mol_type = other DNA
acaaaaatgacactgaaaatgtcaaaaaagcgctgatgataataaatcctgatgcatattattggggtctaataa

SEQ ID NO: 890402 - DNA, 75 bp, synthetic construct
  source 1..75: mol_type = other DNA
gtgaattgctgcattcccagcctgctgatccagccgttggtggaaaacgccattgtccacggtatccagccttgc

SEQ ID NO: 890403 - DNA, 75 bp, synthetic construct
  source 1..75: mol_type = other DNA
aaaaatacaataaaatttatctgccaggggatggttctgctggcctacctcttcttaagtgtggagatgaatttt

SEQ ID NO: 890404 - DNA, 75 bp, synthetic construct
  source 1..75: mol_type = other DNA
aagtactatcatccggacttcgcagataagacgacagaccatagcgataatcgctactggatcctccgcaacatg

SEQ ID NO: 890405 - DNA, 75 bp, synthetic construct
  source 1..75: mol_type = other DNA
ataacagagcgccagcagagcggctgacattccagtttcaccatgaagaaatgtcgagccaaaaggttgatcacc

SEQ ID NO: 890406 - DNA, 75 bp, synthetic construct
  source 1..75: mol_type = other DNA
tcgaaatgttcagagtcgaccctgacctaacggcgcctttactggcgatggtcacaaccatgctgggggcaatgt

SEQ ID NO: 890407 - DNA, 75 bp, synthetic construct
  source 1..75: mol_type = other DNA
ccaggaacggaaattgcgttttacattcctaaccaacgcaccccagtcgcctcacaggctaccttattgctttga

SEQ ID NO: 890408 - DNA, 75 bp, synthetic construct
  source 1..75: mol_type = other DNA
atattctttactcactagttggtctgtcgacaaaccaaaaaataattaactcccctatagatcaattcaaattat

SEQ ID NO: 890409 - DNA, 75 bp, synthetic construct
  source 1..75: mol_type = other DNA
gcgcgccagagctgggctgggtaatgcaagctggcagggcggccacactaatatttcccggctgttcgatcttta

SEQ ID NO: 890410 - DNA, 75 bp, synthetic construct
  source 1..75: mol_type = other DNA
ctgtgggtgagtccgtcctcgggagaggtttttctgcgaaaccactatgcgccgactgacgaccgctcgttcgtg

SEQ ID NO: 890411 - DNA, 75 bp, synthetic construct
  source 1..75: mol_type = other DNA
ttatgtaagaaatatgataagaaatatgtaaaacataaatcagacctgcaaagattcgacgaaaaaaaaatctcc

SEQ ID NO: 890412 - DNA, 75 bp, synthetic construct
  source 1..75: mol_type = other DNA
ttatgggtgaggtgggcaaacaaagtacgatgaagatggatcgcagtggaatgaccttagcagaagcactgggta

SEQ ID NO: 890413 - DNA, 75 bp, synthetic construct
  source 1..75: mol_type = other DNA
aatggtaaccgtttgggatcacccagagctaacaacacctgcaggtcaatatcgtagcgccagcgacacaggtaa

SEQ ID NO: 890414 - DNA, 75 bp, synthetic construct
  source 1..75: mol_type = other DNA
cctatatcagcggcatcgggacggcagacggagaaagtgattcgatactgggtaaagcgctgggcagcagcctta

SEQ ID NO: 890415 - DNA, 75 bp, synthetic construct
  source 1..75: mol_type = other DNA
caaacagcacacattctacctcgaagcggattacacgcagagtaacctctttgatcagaagcaagtcaacggagg

SEQ ID NO: 890416 - DNA, 75 bp, synthetic construct
  source 1..75: mol_type = other DNA
tggagctatccgcgagttttcaggggatacagactatctgttgaacaactcccgggagaagtacagtttcaaagt

SEQ ID NO: 890417 - DNA, 75 bp, synthetic construct
  source 1..75: mol_type = other DNA
tttgtgcctggtcgattttttcgctatgggcatttttcggctggtacaccttaacaaacgtcgaaaagacctggc

SEQ ID NO: 890418 - DNA, 75 bp, synthetic construct
  source 1..75: mol_type = other DNA
agttgtgccatctcgcggctgcgcacaaatacgcgcaaatgctggcagattttctttcaaatggttcacaatact

SEQ ID NO: 890419 - DNA, 75 bp, synthetic construct
  source 1..75: mol_type = other DNA
aggaactggcacaatataatttgtggctggattatctgggcgcactggagctggtcgataccgccagtgcgccag

SEQ ID NO: 890420 - DNA, 75 bp, synthetic construct
  source 1..75: mol_type = other DNA
atcaacgcctcgggtcgtatgcttatcaacggtagcgttctttccaaaggtgggctaatcaatctggatatgcac

SEQ ID NO: 890421 - DNA, 75 bp, synthetic construct
  source 1..75: mol_type = other DNA
gagggtaccgaccgttcgtcgctgcgcattctcggttccgtgggcgagccaattaacccggaagcgtgggagtgg

SEQ ID NO: 890422 - DNA, 75 bp, synthetic construct
  source 1..75: mol_type = other DNA
ttgtccgggcggcgatttgtcgctaccgatgtggggcgaagaggcgcaagacacgctgagggtctgccgtccgct

SEQ ID NO: 890423 - DNA, 75 bp, synthetic construct
  source 1..75: mol_type = other DNA
agagcacgtccggctcggcgttagacgttgaccgcgatttctacaaagcgcttgccgaaggcccgcgtgagctta

SEQ ID NO: 890424 - DNA, 75 bp, synthetic construct
  source 1..75: mol_type = other DNA
ggttcaggacgcagagccaaacttcgatataaatggcaactctccggtaactccgggtggttggataagctgtaa

SEQ ID NO: 890425 - DNA, 75 bp, synthetic construct
  source 1..75: mol_type = other DNA
gcccacaggggccaaaaggggatacgggagccgcaggtccggcaggcccacaggggccgaaaggggataccggag

SEQ ID NO: 890426 - DNA, 75 bp, synthetic construct
  source 1..75: mol_type = other DNA
gaaacccgtttaccggggacgtggcgtgcatgtggtccgttaatatggacatctgctgcgggtatcagacaggca

SEQ ID NO: 890427 - DNA, 75 bp, synthetic construct
  source 1..75: mol_type = other DNA
acggcggtgggaccacagggaccgaaaggcgacaccggagcaacgggtccgcagggacagaagggagacaagggt

SEQ ID NO: 890428 - DNA, 75 bp, synthetic construct
  source 1..75: mol_type = other DNA
ggttctaatacacaatatgaaacgttaaatctgtttatgtttgggttcggtaactcacagattctggatgaaaaa

SEQ ID NO: 890429 - DNA, 75 bp, synthetic construct
  source 1..75: mol_type = other DNA
acgaggctttaaaaagaacattatatcttgattccgcgataaaaccgaccatacgagagattatgggacgtgtta

SEQ ID NO: 890430 - DNA, 75 bp, synthetic construct
  source 1..75: mol_type = other DNA
gctttagatttttgttttggagcagaacaactgaatttttataccgatcctgaattcaagaaagaaaattcggtt

SEQ ID NO: 890431 - DNA, 75 bp, synthetic construct
  source 1..75: mol_type = other DNA
catcactgggagcagaacctgtaagccaaacttacaacttgccagaattaatcgaaggcatggaggtttccattg

SEQ ID NO: 890432 - DNA, 75 bp, synthetic construct
  source 1..75: mol_type = other DNA
cgctggtgctgatttacaacaaagacctgatcgcgaagccgctcaattcacttcaggactggtatgacttttcta

SEQ ID NO: 890433 - DNA, 75 bp, synthetic construct
  source 1..75: mol_type = other DNA
ggataccccactgctgaccgaaggctttagctataaacctcacgcattcgcgctgggctttgttgaagcgccacg

SEQ ID NO: 890434 - DNA, 75 bp, synthetic construct
  source 1..75: mol_type = other DNA
tgatcattgtgcttgcattcgtggcaagttctgcccgatcttcaagcgatggagccagagcacaaaaacttggtt

SEQ ID NO: 890435 - DNA, 75 bp, synthetic construct
  source 1..75: mol_type = other DNA
ttaccctggcggttattgccgctttgtactcaatatctgcccaggctcaggaatttactcaggaacaaatagacg

SEQ ID NO: 890436 - DNA, 75 bp, synthetic construct
  source 1..75: mol_type = other DNA
tgctcggttaaatccggtgttagactgggtaggaataccaattgatggaattgacagtcttgtcaattcagaaat

SEQ ID NO: 890437 - DNA, 75 bp, synthetic construct
  source 1..75: mol_type = other DNA
agtcgtgatttggcacttaataacccaattgctaaaaagtattttaccgaaagtgcgaatgccgtagcaggtagt

SEQ ID NO: 890438 - DNA, 75 bp, synthetic construct
  source 1..75: mol_type = other DNA
agaccgaaactggcggtttcatgatcacgccgctgcctggcgctaccgagctaaaagccggttcggcaacacgtc

SEQ ID NO: 890439 - DNA, 75 bp, synthetic construct
  source 1..75: mol_type = other DNA
gagcgctaccaggagttcttcgtcgataagacgcctgataacagccagaacaggttgtggatcctgcgcaacatg

SEQ ID NO: 890440 - DNA, 75 bp, synthetic construct
  source 1..75: mol_type = other DNA
acaatttacgccagctttgaaggtagtcataaatttacccagcaggcgcaaatcgagtatttactggccttccat

SEQ ID NO: 890441 - DNA, 75 bp, synthetic construct
  source 1..75: mol_type = other DNA
gatcaagcaggcaatggacgcagcaagcgcgcgcattgcagcagaacggaaagccaatctgaatcatgcagtcgc

SEQ ID NO: 890442 - DNA, 75 bp, synthetic construct
  source 1..75: mol_type = other DNA
aagtcgcttaagggggagacggcggaatgtgatgtactcagtttgaatgggcatgcgaaaattaccttcattgag

SEQ ID NO: 890443 - DNA, 75 bp, synthetic construct
  source 1..75: mol_type = other DNA
acatcatgtccaagctggcgaatatagccggcgcgactaatcagcttcagggcgatttatttgaatatattgtcg

SEQ ID NO: 890444 - DNA, 75 bp, synthetic construct
  source 1..75: mol_type = other DNA
cttgaattgcataaaattaagcatctactaattgttacgtcgataattaatttagaagtcttggtgatgctgcca

SEQ ID NO: 890445 - DNA, 75 bp, synthetic construct
  source 1..75: mol_type = other DNA
agctttaaaggcatcggtttatcctggaacaaccgaatatggcccaaggtttcatgttgctcatgatgctgaaac

SEQ ID NO: 890446 - DNA, 75 bp, synthetic construct
  source 1..75: mol_type = other DNA
aacagcgatttcccgggcaactggtggattatcgagacaaaacacaacgtgtcggacgttctggccgtcatccaa

SEQ ID NO: 890447 - DNA, 75 bp, synthetic construct
  source 1..75: mol_type = other DNA
aataatcacctggtctgcaatctgaatatttttctctttaacattaagcttcagatagtttttcagttcctgtga

SEQ ID NO: 890448 - DNA, 75 bp, synthetic construct
  source 1..75: mol_type = other DNA
gcagggctggatccaactggaaaatcgacaccttcccggtgatcgacgccgccacgtccggcgggccggttcagg

SEQ ID NO: 890449 - DNA, 75 bp, synthetic construct
  source 1..75: mol_type = other DNA
gtgagtcaacaattactattaacttccatatatctaaatcaagagagctaatagctaacattttgtccaaaatgg

SEQ ID NO: 890450 - DNA, 75 bp, synthetic construct
  source 1..75: mol_type = other DNA
cggcaatcggattgatcgtaatgcttgtgctgggtgcgtttggcctgggcagcatgcgtggacgcgaaaaagccg

SEQ ID NO: 890451 - DNA, 75 bp, synthetic construct
  source 1..75: mol_type = other DNA
ccggcaggctgaccggcgtccacaccacggcagcgaaccttgatatccgcatcccgtatgccacggacccggcgg

SEQ ID NO: 890452 - DNA, 75 bp, synthetic construct
  source 1..75: mol_type = other DNA
tcggcgacacaccgctggtggatttcacccgcgaccgcctgcaccgggaaacgctgcgcagcttcggccgttatg

SEQ ID NO: 890453 - DNA, 75 bp, synthetic construct
  source 1..75: mol_type = other DNA
taatatatggtaaggagtgttttgattcccgcactcttcaaagtttaaagttatgccctttacaccaaaatatta

SEQ ID NO: 890454 - DNA, 75 bp, synthetic construct
  source 1..75: mol_type = other DNA
gtgccggtctgcgccagaacttccgtatcttccagaacgaggacatcaaaagcatcctcggcacgatgttgcagg

SEQ ID NO: 890455 - DNA, 75 bp, synthetic construct
  source 1..75: mol_type = other DNA
ggatggcggcggaggaaggcatcttcttttatgaggagcatgcttacaaaagtaccgaccagagcctggtcctgt

SEQ ID NO: 890456 - DNA, 75 bp, synthetic construct
  source 1..75: mol_type = other DNA
atgaaaccgttacattatacagcttcagcactggtgctcggactgacgttaatggggaatgcacaggcagtgacg

SEQ ID NO: 890457 - DNA, 75 bp, synthetic construct
  source 1..75: mol_type = other DNA
tttcgtaccggcaacgctccggctattttgcaggtttatgaagttggcaccgccaccatgatggcatcgaaagcc

SEQ ID NO: 890458 - DNA, 75 bp, synthetic construct
  source 1..75: mol_type = other DNA
aaggggaactgggtaaagaggtggattctctggcccaacgttttaacgccgaaaatccggattacaaaattgtac

SEQ ID NO: 890459 - DNA, 75 bp, synthetic construct
  source 1..75: mol_type = other DNA
gggaaacgctgcgcagcttcggccgttatgaactcaccaccgcttacacctctgccgggcagttacagagccagc

SEQ ID NO: 890460 - DNA, 75 bp, synthetic construct
  source 1..75: mol_type = other DNA
ccgaccttagcggcactgaatttattggctgccagttttatgatcgagaaagtcagaaaggatgtaattttagtc

SEQ ID NO: 890461 - DNA, 75 bp, synthetic construct
  source 1..75: mol_type = other DNA
tttcgagtcactggtcgcggaaattcaccgcgaaaacccggaaatggttgtcatctgtggtcgccgcattctgac

SEQ ID NO: 890462 - DNA, 75 bp, synthetic construct
  source 1..75: mol_type = other DNA
gtgggtaaaggagggcattacgccaacctcgacgcgctggtcatggatgctttcgagtcactggtcgcggaaatt

SEQ ID NO: 890463 - DNA, 75 bp, synthetic construct
  source 1..75: mol_type = other DNA
gttgaggactaccgctgcgccgcactggtggaaaacatccagattggcgacttcagcgccaccgcagcagaagcc

SEQ ID NO: 890464 - DNA, 75 bp, synthetic construct
  source 1..75: mol_type = other DNA
gatttgaccaattcggaactgggcgatttagatatccgcggggttgatttgcaaggcgtcaaactggacagctac

SEQ ID NO: 890465 - DNA, 75 bp, synthetic construct
  source 1..75: mol_type = other DNA
atgccctgatggtgacgcgtctcgataacctgtcgatttacttcatggatgacgcacaccgccgcgccatcattg

SEQ ID NO: 890466 - DNA, 75 bp, synthetic construct
  source 1..75: mol_type = other DNA
gggcgtagccagctcgaccttaggtattgcgcaagtttgcggttcgtcactgtggatttggctggcggcggtggt

SEQ ID NO: 890467 - DNA, 75 bp, synthetic construct
  source 1..75: mol_type = other DNA
gactgttagccatatgcctgatgacgatgttgatcgggagctgcgcgaaaagtttacccgccccggtagtcgttg

SEQ ID NO: 890468 - DNA, 75 bp, synthetic construct
  source 1..75: mol_type = other DNA
atgaggagtccggcctgtattacaaccgccaccgctattatgacccgctgcaggggcggtatatcactcaggaac

SEQ ID NO: 890469 - DNA, 75 bp, synthetic construct
  source 1..75: mol_type = other DNA
ttgttcccttatcctggatttcagtctggttttgttgaggttaacgacagtagccagggcaatcagcaggggaca

SEQ ID NO: 890470 - DNA, 75 bp, synthetic construct
  source 1..75: mol_type = other DNA
tagtgagcctgttgctgattatgctcgtcacacctggacgccctgttaccgctcatgaagaaatccatcaccacg

SEQ ID NO: 890471 - DNA, 75 bp, synthetic construct
  source 1..75: mol_type = other DNA
tggtatcggcgcatggaatatgctgatcgggattctgattgcctgtagcatagtgagcctgttgctgattatgct

SEQ ID NO: 890472 - DNA, 75 bp, synthetic construct
  source 1..75: mol_type = other DNA
ttcctgaagatagattacttggccatcgtttccttgatgataatgaactaaaaacaaaagaaaaagccactgaca

SEQ ID NO: 890473 - DNA, 75 bp, synthetic construct
  source 1..75: mol_type = other DNA
aatatcgcattggagttggcgatgtgttgatggttacggtatgggaccacccggaactgacgactcctgcaggtc

SEQ ID NO: 890474 - DNA, 75 bp, synthetic construct
  source 1..75: mol_type = other DNA
gctcgctgacggctgtcagcctagtgccaggtaccactaatacactgacttactatgccaggctaatgtcaaccc

SEQ ID NO: 890475 - DNA, 75 bp, synthetic construct
  source 1..75: mol_type = other DNA
acgcatttctttgcaggcgctgatgcaaaacggcgacctcaatcagaaccgactgctttatcccggcgatattct

SEQ ID NO: 890476 - DNA, 75 bp, synthetic construct
  source 1..75: mol_type = other DNA
tgttctggcccgtccaaatccacagttagataatttactgcgtagttatgagtataggatcggggtaggcgatgt

SEQ ID NO: 890477 - DNA, 75 bp, synthetic construct
  source 1..75: mol_type = other DNA
atgaccgttgctgaagcattaggaaatgctgaaggaatgtcgcaggcgttcagtgacgcaacaggtgtgtttgta

SEQ ID NO: 890478 - DNA, 75 bp, synthetic construct
  source 1..75: mol_type = other DNA
attcgtcagttaaaagatgataagcagggtaaaattgctaatatttatcagctcaacgcccaagacgcttctgct

SEQ ID NO: 890479 - DNA, 75 bp, synthetic construct
  source 1..75: mol_type = other DNA
atggtactcggaactgaatttcaactgcagccttatgatatagtatatgtcacaacagcacctttggtgcgttgg

SEQ ID NO: 890480 - DNA, 75 bp, synthetic construct
  source 1..75: mol_type = other DNA
taacggtaaagatacgaaaatttcactgtatgcgctaatgcaaaaaggagatttgtcgcaaaaccatcttcttta

SEQ ID NO: 890481 - DNA, 75 bp, synthetic construct
  source 1..75: mol_type = other DNA
aactacggcgcctttggttcgttggaatcgagtaatctcacagctcgttccaacaataaccggagtacatgacat

SEQ ID NO: 890482 - DNA, 75 bp, synthetic construct
  source 1..75: mol_type = other DNA
cggcattggcgttggcaataggttttttatcgggttgtactattatcccaggccaagggttaaatagtctacgta

SEQ ID NO: 890483 - DNA, 75 bp, synthetic construct
  source 1..75: mol_type = other DNA
aatgtttatcccatgacgccaggcctaatagaccagcttcgtccggcaaccgttcttgctcgcccaaatccgcag

SEQ ID NO: 890484 - DNA, 75 bp, synthetic construct
  source 1..75: mol_type = other DNA
attgatggttactgtttgggatcacccggagctgacaacgcctgcagggcaataccgtagcgccagcgacactgg

SEQ ID NO: 890485 - DNA, 75 bp, synthetic construct
  source 1..75: mol_type = other DNA
atggtccttggcaccgaattccaattgcagccttatgatattgtgtatgtgacgacagcacctttggttcgttgg

SEQ ID NO: 890486 - DNA, 75 bp, synthetic construct
  source 1..75: mol_type = other DNA
tttgcccacggattttaccgctgcgcgtctttactcaaatgggcgattgagaagcgacgtggaaaacaggcgggg

SEQ ID NO: 890487 - DNA, 75 bp, synthetic construct
  source 1..75: mol_type = other DNA
gagaatcagaaggacccggccccctttgtggtgacgccgccgcttttccgtctggatgcacttcagtcgagccgt

SEQ ID NO: 890488 - DNA, 75 bp, synthetic construct
  source 1..75: mol_type = other DNA
ctgcatctgaagggagcgtcagcccccggcgaaggcgagttgctgattggctggagtggcacggatggcgcacat

SEQ ID NO: 890489 - DNA, 75 bp, synthetic construct
  source 1..75: mol_type = other DNA
taacccgaacgcggctacggagtgatgaggttcatcgtctccagcgtctgatacgcctgctgcacggtactgatg

SEQ ID NO: 890490 - DNA, 75 bp, synthetic construct
  source 1..75: mol_type = other DNA
tcaaaagtgacaatcctcaaacaaaaggtaaccggctcatttaaaccgtctggtctgtttcctccggctctacaa

SEQ ID NO: 890491 - DNA, 75 bp, synthetic construct
  source 1..75: mol_type = other DNA
agagaacaaactcaccaaagagaacctgttcactccagtaactgtgaagaacgctatcgattactggtttgataa

SEQ ID NO: 890492 - DNA, 75 bp, synthetic construct
  source 1..75: mol_type = other DNA
aatcgtgttatatcacagctcgtacctacaatatcaggtgttcatgatatgacggaaacagtacgatacattaag

SEQ ID NO: 890493 - DNA, 75 bp, synthetic construct
  source 1..75: mol_type = other DNA
aaccgtgtaatatcacaacttgtaccaacaattacaggtgttcatgatatgacagaaaccgggaaatttataagg

SEQ ID NO: 890494 - DNA, 75 bp, synthetic construct
  source 1..75: mol_type = other DNA
aacagagtaatttcgcaactggtaccaacgattactggagttcatgacatgactgaaactgcgaaatttataaag

SEQ ID NO: 890495 - DNA, 75 bp, synthetic construct
  source 1..75: mol_type = other DNA
agagaaggctggcgctatttacttctcttcagctttcttattatgaaaaaatatccgggaaaaacaaatttctct

SEQ ID NO: 890496 - DNA, 75 bp, synthetic construct
  source 1..75: mol_type = other DNA
aaggtaaaatagcaaatgtttatcaattgaatgctcaggatgcttcggcaatggtgctcggcactgaatttcagc

SEQ ID NO: 890497 - DNA, 75 bp, synthetic construct
  source 1..75: mol_type = other DNA
gttgctccttattgcctcccggcgtctccgcgcatcactcgaaactgcactcatcgtactgcagaagtggacggt

SEQ ID NO: 890498 - DNA, 75 bp, synthetic construct
  source 1..75: mol_type = other DNA
tgggggaaatacccctagcatgacagagtttaaagaccctaaagacagagcaaagtggattcagaaaaatctgag

SEQ ID NO: 890499 - DNA, 75 bp, synthetic construct
  source 1..75: mol_type = other DNA
ttactgaaatcataaattccggttctatatccggcgcatctaattgctttaacataagcactgcaacaggtagtc

SEQ ID NO: 890500 - DNA, 75 bp, synthetic construct
  source 1..75: mol_type = other DNA
cgatgactgaacagcaaatccgtctggtctgccgtcagtgcatggaccgctgccgggcgggtgaaacgtggcccc

SEQ ID NO: 890501 - DNA, 75 bp, synthetic construct
  source 1..75: mol_type = other DNA
gtaatccacatacaaaaataaatattctttatagcaataagactgagcataatatttttataaaggatttattct

SEQ ID NO: 890502 - DNA, 75 bp, synthetic construct
  source 1..75: mol_type = other DNA
ttgtctttcgttatgattctcattttttagctttgaaaaatatttttgagcagatagatgttgattcatatgatt

SEQ ID NO: 890503 - DNA, 75 bp, synthetic construct
  source 1..75: mol_type = other DNA
tataataagtttaattttaaacacattccacgtattaaaaaaaatggatggaggagaacttttattactctaggg

SEQ ID NO: 890504 - DNA, 75 bp, synthetic construct
  source 1..75: mol_type = other DNA
ccgtcaggccaagaagcattttgaccggctgcatgctcaggaccaaatcaagcgcaaagcacgacgcgagcgctt

SEQ ID NO: 890505 - DNA, 75 bp, synthetic construct
  source 1..75: mol_type = other DNA
ataacgatgcgttattaaatttggcgttaatgtatcgtgatggtaaaggtgtaagtaaaatccacaaaaagctat

SEQ ID NO: 890506 - DNA, 75 bp, synthetic construct
  source 1..75: mol_type = other DNA
gagtgagctggctcctgccgtcgcccgtgccttcaacaaactgaaaacgctacgcgaaaacgcccgtagctggct

SEQ ID NO: 890507 - DNA, 75 bp, synthetic construct
  source 1..75: mol_type = other DNA
ttatggttaatgtgagagctggtgaaagtatgctttctcgacgaaaaggaattcgctatatatatagtgagtatg

SEQ ID NO: 890508 - DNA, 75 bp, synthetic construct
  source 1..75: mol_type = other DNA
aatggcaatccgtgccggaagaaaaagcggttcggtataagacatgggggcagcaccgtaccggaaaggtcaggt

SEQ ID NO: 890509 - DNA, 75 bp, synthetic construct
  source 1..75: mol_type = other DNA
gccgggaagcctgtattttcaacgttttggcggcttgaatattgaacaggaggcgttatgccaatttatcagata

SEQ ID NO: 890510 - DNA, 75 bp, synthetic construct
  source 1..75: mol_type = other DNA
gtccgccgtgatgtaacacccggctttattgccacagagctgattatctggcttaacgcgcataaaatcatcaga

SEQ ID NO: 890511 - DNA, 75 bp, synthetic construct
  source 1..75: mol_type = other DNA
cgaagatgcaatccctgatttgttacgtagaagtcacacagccacaaatgcggcagttgtgaaaaacgagggatg

SEQ ID NO: 890512 - DNA, 75 bp, synthetic construct
  source 1..75: mol_type = other DNA
gtgataaaactgaatgattacgacatgttgcgtaaattgattcctcaaaacgccatagcaagatacatcggtgtt

SEQ ID NO: 890513 - DNA, 75 bp, synthetic construct
  source 1..75: mol_type = other DNA
agcctggcaacacattttgctgaacggacattataccttccagaacaataatgaacttattgacctggatacatt

SEQ ID NO: 890514 - DNA, 75 bp, synthetic construct
  source 1..75: mol_type = other DNA
tcaggcgaagagggggaaactgccaggctgaatgccggacgttatgaattctggctctaccgacaaatcagaaaa

SEQ ID NO: 890515 - DNA, 75 bp, synthetic construct
  source 1..75: mol_type = other DNA
aaattctgcctgccctgaatatttctcagcaaaaccttctgtattatgccagtctggcaaatttctataccgttt

SEQ ID NO: 890516 - DNA, 75 bp, synthetic construct
  source 1..75: mol_type = other DNA
atgacaatgtccgttggtgctgctaatggggaagttaccgaacagggtggtgacttcgacgacttcattttccga

SEQ ID NO: 890517 - DNA, 75 bp, synthetic construct
  source 1..75: mol_type = other DNA
cgatggccttcgaccgatggcgcattgaccagttcaggaaagaggctgacgacatcggcctgagccttcctctgg

SEQ ID NO: 890518 - DNA, 75 bp, synthetic construct
  source 1..75: mol_type = other DNA
agaccgcgcgccctatgacgtatgggcaagggaggggcttttgcgtaccacgcccggtgcgtccgtcgattactc

SEQ ID NO: 890519 - DNA, 75 bp, synthetic construct
  source 1..75: mol_type = other DNA
cctgatgatttcagggaactttcagacctgcgtaaatttccctgtaccaccaaacaggatctgcgcgacaactat

SEQ ID NO: 890520 - DNA, 75 bp, synthetic construct
  source 1..75: mol_type = other DNA
cagcccgcgaaggtcttggcaaccctgaactattccaaggaggcgtttatgttacgaaaaatggtttagcagaac

SEQ ID NO: 890521 - DNA, 75 bp, synthetic construct
  source 1..75: mol_type = other DNA
atcctcagcatcgcccgaaaaaatggtaagactggcctgattgccggaattctgctggctcacctggtggggcct

SEQ ID NO: 890522 - DNA, 75 bp, synthetic construct
  source 1..75: mol_type = other DNA
gtacctgttacagacctgtcgttaaagaaccttcttacacatgcgccccttcggctcccggctgcctggcggcat

SEQ ID NO: 890523 - DNA, 75 bp, synthetic construct
  source 1..75: mol_type = other DNA
actacgccaaagagaaaacgctcggcgacgacatgaagcgcgagtacccgaccatcccggccgaggcattccagc

SEQ ID NO: 890524 - DNA, 75 bp, synthetic construct
  source 1..75: mol_type = other DNA
tatttattcagcaatattgaagtttaataaagatagaaatttgtataaccactctaggagtttgtgtgataagac

SEQ ID NO: 890525 - DNA, 75 bp, synthetic construct
  source 1..75: mol_type = other DNA
cttttctcatttagaaacaataagtaatgaatttatcagaaatcaaaataaagaagaaataaaaaaaacttggtg

SEQ ID NO: 890526 - DNA, 75 bp, synthetic construct
  source 1..75: mol_type = other DNA
gcaacattatgcaatcttcgtatatttgttcaaaaaaaataatataagatgttcattaattgaagaggggacagg

SEQ ID NO: 890527 - DNA, 75 bp, synthetic construct
  source 1..75: mol_type = other DNA
cctgcacgtttccgagttcggcaaaatatgcgccaagtatccggacaaagcccgtgaaatcgtcactggtgcgtt

SEQ ID NO: 890528 - DNA, 75 bp, synthetic construct
  source 1..75: mol_type = other DNA
ccgaaatgcgtattcgacgaggagaaatgctcggaaggcatctctcaccttgagggctaccggaaagagtgggac

SEQ ID NO: 890529 - DNA, 75 bp, synthetic construct
  source 1..75: mol_type = other DNA
ttgggtttacaacggcaatgggcaatatcaaagacagtatatggcacattttgcggaagcgaatttgaatgcgca

SEQ ID NO: 890530 - DNA, 75 bp, synthetic construct
  source 1..75: mol_type = other DNA
acaacggtgcaacgttgtctccgacggtcatcacagggccggacggcacggtggagatcagtgtcaccagccaga

SEQ ID NO: 890531 - DNA, 75 bp, synthetic construct
  source 1..75: mol_type = other DNA
accatcgcgcaattttttgcccgctgcgataaatgtcagcagtgcgttcagacttgcccgatgggtgtattggtt

SEQ ID NO: 890532 - DNA, 75 bp, synthetic construct
  source 1..75: mol_type = other DNA
aagaatggtaaagggaatgatgttgtatttaaattcaagattaaaaaatggtttactagtttaggtgctagcagt

SEQ ID NO: 890533 - DNA, 75 bp, synthetic construct
  source 1..75: mol_type = other DNA
cggcgcagatcgcggatctggtggtcattaaggatggttcagaggcggacggttcgacggcgaacacgctgcggg

SEQ ID NO: 890534 - DNA, 75 bp, synthetic construct
  source 1..75: mol_type = other DNA
cagataaatcggcatatatcgccggggagccattaaccgtcacaataacgttgcgggatgagtttgataaccctg

SEQ ID NO: 890535 - DNA, 75 bp, synthetic construct
  source 1..75: mol_type = other DNA
ttatttaataaatggatttaatcatacctgcaatggacaatgttatttttcaagatctggacttattgttgacta

SEQ ID NO: 890536 - DNA, 75 bp, synthetic construct
  source 1..75: mol_type = other DNA
cacccgatcccatcaataatccccctgttgtggatccggaaggcccatcagtttatcgcccggaggccggaagct

SEQ ID NO: 890537 - DNA, 75 bp, synthetic construct
  source 1..75: mol_type = other DNA
aagcagccatggacagaaactatctggcgtcagtccttgcggggagcgggctttcgtaatcttgccctgatgggg

SEQ ID NO: 890538 - DNA, 75 bp, synthetic construct
  source 1..75: mol_type = other DNA
ggactttggcagccagctgaacggtgtcctggtgaaacaggatggcgcggcgaacattggcgagatgaaagtggg

SEQ ID NO: 890539 - DNA, 75 bp, synthetic construct
  source 1..75: mol_type = other DNA
ataaaaaaatttgtaaaataataggggttccttttaatggaattctttttggtccaccatggattaaaaatgtca

SEQ ID NO: 890540 - DNA, 75 bp, synthetic construct
  source 1..75: mol_type = other DNA
atgacgttcaacgcgacgctgggcggcgataattcgcccaccgataaaatgaacgtgaaaggcgatacccaaggg

SEQ ID NO: 890541 - DNA, 75 bp, synthetic construct
  source 1..75: mol_type = other DNA
tttgataacagcgtcagttccgataaccgttctgctgacgactatgattctcgcggtgtgacggcctctgttgag

SEQ ID NO: 890542 - DNA, 75 bp, synthetic construct
  source 1..75: mol_type = other DNA
aaacgcccgcgccggtggggagccccggccccggctggaaactgccagcggatacgagagtacagctgcgcgata

SEQ ID NO: 890543 - DNA, 75 bp, synthetic construct
  source 1..75: mol_type = other DNA
agactggtctaatgattctttagaaacatgtaagatgaagtgctccggaaataacattggacgttttattagatt

SEQ ID NO: 890544 - DNA, 75 bp, synthetic construct
  source 1..75: mol_type = other DNA
gcgtaacacctgatggtgcaacgctaagcaatacaggggaaatcctgactgatcagtcaggtcaggccaaagtga

SEQ ID NO: 890545 - DNA, 75 bp, synthetic construct
  source 1..75: mol_type = other DNA
gacatacaaatgaccctatatttgaagaacaattttataaaataacacaatctcatattgactttgacaaaagag

SEQ ID NO: 890546 - DNA, 75 bp, synthetic construct
  source 1..75: mol_type = other DNA
ggataacaccatagatattccgcgtattattgtttcaccatcaggtgaagtacgtaccggctatcacccgttcga

SEQ ID NO: 890547 - DNA, 75 bp, synthetic construct
  source 1..75: mol_type = other DNA
tacaagaacctaaagccacttataccacgcctaaccaacaaaccgttgcccgcgctgcattggacgtgatcaagc

SEQ ID NO: 890548 - DNA, 75 bp, synthetic construct
  source 1..75: mol_type = other DNA
tgagaacccccgaagtgtatgctcaatatgatattgaatttcatagtatacttgctgatatacctgacaataaag

SEQ ID NO: 890549 - DNA, 75 bp, synthetic construct
  source 1..75: mol_type = other DNA
atggcaaaccgtaaacagcaccgcgctatcgcggagcgtcgtcacatccagaccgaaatcaaccgcagattgtac

SEQ ID NO: 890550 - DNA, 75 bp, synthetic construct
  source 1..75: mol_type = other DNA
aaccttatgcattagttgttactgcaacggatagagaaaacgctgaagccaatctttacagcgaaatagaggcac

SEQ ID NO: 890551 - DNA, 75 bp, synthetic construct
  source 1..75: mol_type = other DNA
tatttcgaggttgccgctattatcgctgatggttacatcgtaaaaaccatcacctctgctgctgttagccaaaag

SEQ ID NO: 890552 - DNA, 75 bp, synthetic construct
  source 1..75: mol_type = other DNA
gaaaaatctaccctgacgccgatatcaaaacagcaaagctcttacaccgcgaaactgagcgcctacgggacgctg

SEQ ID NO: 890553 - DNA, 75 bp, synthetic construct
  source 1..75: mol_type = other DNA
tctgtatcaaaatttagcgactggtcacgtatttatagtacctttggtatcaatctgctaagcaccggactggta

SEQ ID NO: 890554 - DNA, 75 bp, synthetic construct
  source 1..75: mol_type = other DNA
agcgctggtgttctcttcaatgtttctccggttgttatatcatcaaaaataagacttaacttctcccaagagctt

SEQ ID NO: 890555 - DNA, 75 bp, synthetic construct
  source 1..75: mol_type = other DNA
atgttgctaaacatgatgtgtggtcgtcggctttcggcaatgagtttgtgtctggccgtaacattcgctccactg

SEQ ID NO: 890556 - DNA, 75 bp, synthetic construct
  source 1..75: mol_type = other DNA
cggaccgtatcacccggcgcacggtgaacggtgaaccggcggagcagtggcagtatgacgaccacggctggctga

SEQ ID NO: 890557 - DNA, 75 bp, synthetic construct
  source 1..75: mol_type = other DNA
atagaaaataacgcccatcagttttttgaactacccttcccggcttcttttttaagatcgcagcgatcaacccgt

SEQ ID NO: 890558 - DNA, 75 bp, synthetic construct
  source 1..75: mol_type = other DNA
agcgcatcgggacgtcaggttggttgatttgccaccgtccagcggcattagctatcaacaaattaaccgggacat

SEQ ID NO: 890559 - DNA, 75 bp, synthetic construct
  source 1..75: mol_type = other DNA
aatggcggcaaacgtagcgactggacggtgaaattcgccgaaaaccgcagtcaggacggaacgttgctgggctac

SEQ ID NO: 890560 - DNA, 75 bp, synthetic construct
  source 1..75: mol_type = other DNA
ctatgggtttcacgggtaaacgtgctgcccagttcaaggaggcatacatcaatgcctttaaccagatggagaaac

SEQ ID NO: 890561 - DNA, 75 bp, synthetic construct
  source 1..75: mol_type = other DNA
tgttgactacgccgccgtgacgggtttacttgttcaggtcgcccgtgaaacagatgatcgcgttaccgcgctgga

SEQ ID NO: 890562 - DNA, 75 bp, synthetic construct
  source 1..75: mol_type = other DNA
gttattgcacaggaagtaatggaggcgataccagaagctgtgggatcgtttactcattacggtgaagagttgcag

SEQ ID NO: 890563 - DNA, 75 bp, synthetic construct
  source 1..75: mol_type = other DNA
actgaatcagtcatcagaccgcagactgaaagaaaatatcgagattatcgataacgcgactgacgcaatccgcaa

SEQ ID NO: 890564 - DNA, 75 bp, synthetic construct
  source 1..75: mol_type = other DNA
gacgaggccttcgtctccagctgcgatatttccctgaataaagcctggagcgcctgcagcctgaagcaaggtacc

SEQ ID NO: 890565 - DNA, 75 bp, synthetic construct
  source 1..75: mol_type = other DNA
acttcaaacgttggtgatgccgcatttttacttgataaggttgattttgttgttccagccggaaactcgtattta

SEQ ID NO: 890566 - DNA, 75 bp, synthetic construct
  source 1..75: mol_type = other DNA
cgggcgtggtgcaggtgccacataacgggcagccgattgtgttgatgaacgacgcacagaccaccggtggttacc

SEQ ID NO: 890567 - DNA, 75 bp, synthetic construct
  source 1..75: mol_type = other DNA
cacggcagagaagaaatccgtattcatattgtttgcgatgtccctgatgaacttattgatttcacgtttgaatgg

SEQ ID NO: 890568 - DNA, 75 bp, synthetic construct
  source 1..75: mol_type = other DNA
ggccgggatttggtaatctggcgataccgcgggtgggccaggaggtgattgttgatttcctgaacggggacccgg

SEQ ID NO: 890569 - DNA, 75 bp, synthetic construct
  source 1..75: mol_type = other DNA
aacggtggggttgggccagacggtgaatgtggggagcaaaaaggaaggtggtcatgaccagaaagtgacggtagc

SEQ ID NO: 890570 - DNA, 75 bp, synthetic construct
  source 1..75: mol_type = other DNA
cgctaaccatcaacaaagatgaggttaactcaactgccgatttagtaattagaaaacaaacagggactggcaatc

SEQ ID NO: 890571 - DNA, 75 bp, synthetic construct
  source 1..75: mol_type = other DNA
cggtgttctggctgtgtggtggcagttgcggcggtctgctctgtcttcagcgttatctgtatggaggtttcccgt

SEQ ID NO: 890572 - DNA, 75 bp, synthetic construct
  source 1..75: mol_type = other DNA
caggtgcgcattaccattacaaatggtctggtaaaaacgcctgtatatggagttcctgaggctggcggaaatagt

SEQ ID NO: 890573 - DNA, 75 bp, synthetic construct
  source 1..75: mol_type = other DNA
acctgtatgcgctggaacagtaaacaggatttacccgtgccttatcgtgttgatgctgatggcaatgaaaacctt

SEQ ID NO: 890574 - DNA, 75 bp, synthetic construct
  source 1..75: mol_type = other DNA
gccaggctaagaaacacctgaacgatgtcatcaacgacgtaaaggggcgcaaagttattcgcgcgttgcagtcgg

SEQ ID NO: 890575 - DNA, 75 bp, synthetic construct
  source 1..75: mol_type = other DNA
tggcatcgctggaagcagagccggtggcaaagattatagctcattacccattaggggttgacgtaggcggtaatg

SEQ ID NO: 890576 - DNA, 75 bp, synthetic construct
  source 1..75: mol_type = other DNA
ggttgacttcgctattcctatgaccatccagatagataagccaatatatccaccagaatctgattctccaggcta

SEQ ID NO: 890577 - DNA, 75 bp, synthetic construct
  source 1..75: mol_type = other DNA
cagcatcttctacgaggatggcacgatcgcaggctcaacggagtgggtgctgacggcgatgacggaatgcgctgc

SEQ ID NO: 890578 - DNA, 75 bp, synthetic construct
  source 1..75: mol_type = other DNA
gccaggcgaaaaagcacctgaacgatgtcatcaacgacgtgaagtggcgcaaggtgattcgcgcgctgcagtcgg

SEQ ID NO: 890579 - DNA, 75 bp, synthetic construct
  source 1..75: mol_type = other DNA
aggcgtcaggaaagctgaaaggtcagccgcgcgcgcactttggtataaccagcaaccgatctgagttcggtccgc

SEQ ID NO: 890580 - DNA, 75 bp, synthetic construct
  source 1..75: mol_type = other DNA
tgtgtgatttacaatataatttatctaattccttagataaaaaatatatctgtcataaaagagcagtgtggtgtt

SEQ ID NO: 890581 - DNA, 75 bp, synthetic construct
  source 1..75: mol_type = other DNA
gtaggttggctgctgtccgaggttatggaatgggttaaaagccgggatcgcattaattcaggtaaggcagcgtaa

SEQ ID NO: 890582 - DNA, 75 bp, synthetic construct
  source 1..75: mol_type = other DNA
ctcttaaaccaaggtttaggattgaaatgatgacgcaggaaactttttataaagcgtggaaacagcaacatcata

SEQ ID NO: 890583 - DNA, 75 bp, synthetic construct
  source 1..75: mol_type = other DNA
atatagatcatttaactctgaggactgttaccattatcatttaggttcacctattaataaagccaatggttcttt

SEQ ID NO: 890584 - DNA, 75 bp, synthetic construct
  source 1..75: mol_type = other DNA
aaaaacgtgatctgggattacccgaaagactttattgcaggcaacggtggagtgcgtaattttcacggtgaaact

SEQ ID NO: 890585 - DNA, 75 bp, synthetic construct
  source 1..75: mol_type = other DNA
gccaactataaagtgctagaatattttattaataatggattggttgatgtaaacaaaagatttcaaaaagcaaat

SEQ ID NO: 890586 - DNA, 75 bp, synthetic construct
  source 1..75: mol_type = other DNA
ccgtttgtgagcatccagcagcgcctgcacaccgacgacgcaacgggcttcatgcttgccggcggaatgggcgtg

SEQ ID NO: 890587 - DNA, 75 bp, synthetic construct
  source 1..75: mol_type = other DNA
agattcctcggtatcgttaagtacccaaacaattgaacgcggattcccattcaaccgccacactgacttttattg

SEQ ID NO: 890588 - DNA, 75 bp, synthetic construct
  source 1..75: mol_type = other DNA
ataagggaaaggaaaagagccctggctccggtgtcggaatttcgttacaaattgccatcgataactgtatcaaaa

SEQ ID NO: 890589 - DNA, 75 bp, synthetic construct
  source 1..75: mol_type = other DNA
cgatggcgatccagcaggtcaccacgtttgtgaaagcaagggtggagcaggataaccgtaaaataatcaaacact

SEQ ID NO: 890590 - DNA, 75 bp, synthetic construct
  source 1..75: mol_type = other DNA
tcggcaagaaaaaacctatagatttaatttcactatatagacgttctcgctttcatgtatcggcaagttggttcg

SEQ ID NO: 890591 - DNA, 75 bp, synthetic construct
  source 1..75: mol_type = other DNA
atacattaataaaagtgcacaaaacgtatataacgattttcgtaatgaaatatgggaacgtatgaaaaaggtaca

SEQ ID NO: 890592 - DNA, 75 bp, synthetic construct
  source 1..75: mol_type = other DNA
ctgttaatgcaaaactggaatgaagatttgcataccgctggatttatcatcgacgccaacccgcagtcagcaaaa

SEQ ID NO: 890593 - DNA, 75 bp, synthetic construct
  source 1..75: mol_type = other DNA
caggtaccggaagtgaacgatcaggacggtaacggcatccctgattttattgattctcagttggccttctttaat

SEQ ID NO: 890594 - DNA, 75 bp, synthetic construct
  source 1..75: mol_type = other DNA
agtcaggatattcagccgctggtggaagtcgaaaaagaggtgattcttgcggcactggagaaaacgggcggcaac

SEQ ID NO: 890595 - DNA, 75 bp, synthetic construct
  source 1..75: mol_type = other DNA
actggtgcaggaaggcaaactcaagcgctttcgtaacctgaatatctcgtttgctgacaccctggttaaacgtaa

SEQ ID NO: 890596 - DNA, 75 bp, synthetic construct
  source 1..75: mol_type = other DNA
ttgccgggcgccggtgccgtgtgggaatccccccaccttgccgggcgccggtgccgtgtggaaatccgcccacct

SEQ ID NO: 890597 - DNA, 75 bp, synthetic construct
  source 1..75: mol_type = other DNA
accttgccgggcgccggtgctgtgtggaaatccgcccaccttgccgcgcgccggtgccgtgtgggaatccgccca

SEQ ID NO: 890598 - DNA, 75 bp, synthetic construct
  source 1..75: mol_type = other DNA
tgatttatgtcagacgggattttgcttatcaattattgagaacagaaattttcctgaatcatcaatactatactt

SEQ ID NO: 890599 - DNA, 75 bp, synthetic construct
  source 1..75: mol_type = other DNA
ttctccagttattacgtcagactcaggatagccaattttctacgttggggaaaaaaaatgggcaaatgaagtcta

SEQ ID NO: 890600 - DNA, 75 bp, synthetic construct
  source 1..75: mol_type = other DNA
aagaaacgagtagctcatggtgttcttgtatcatctctaacatcagcagtattaggtatgaaactcccaggtgaa

SEQ ID NO: 890601 - DNA, 75 bp, synthetic construct
  source 1..75: mol_type = other DNA
aaaagcgttttcaggtcgcccggggtgatacatctggccagtatgttgcgttaaaaacagtcgcattgtctctgg

SEQ ID NO: 890602 - DNA, 75 bp, synthetic construct
  source 1..75: mol_type = other DNA
tttcgaactgcgtaaagctcgcgaccgtgctcatatccttgaagcattagccgtggcgctggcaaacatcgaccc

SEQ ID NO: 890603 - DNA, 75 bp, synthetic construct
  source 1..75: mol_type = other DNA
ccgttggcgatgtccgggctgatatccgtgttcgtctactgctttatggtggcgtggaacgactatctgtttgcg

SEQ ID NO: 890604 - DNA, 75 bp, synthetic construct
  source 1..75: mol_type = other DNA
gttgccaccttttaaagaggatatcttttctaaaacagaagaacaatttaaaaaaaagcccccatggcaaattgc

SEQ ID NO: 890605 - DNA, 75 bp, synthetic construct
  source 1..75: mol_type = other DNA
tcgaaaatatctgagccacacaaatgggtaacagatatttcaattaataaaaatctcaaaactgataccatgtgg

SEQ ID NO: 890606 - DNA, 75 bp, synthetic construct
  source 1..75: mol_type = other DNA
gcgctgtttgtcaccgtgaaaaacgacggtgcggcggcaaaagccaataacaacgagagcgtcgtgcgcattcct

SEQ ID NO: 890607 - DNA, 75 bp, synthetic construct
  source 1..75: mol_type = other DNA
cgcgctttcgtgtcagtgaaggctatccttggaaacttcgtgaactggtttttgatccagtcacggatcgtctgt

SEQ ID NO: 890608 - DNA, 75 bp, synthetic construct
  source 1..75: mol_type = other DNA
atttgtctgtaactacatttgttaatctcattatcttagtggatacgatgacagtgcgtgacagcaggatcttca

SEQ ID NO: 890609 - DNA, 75 bp, synthetic construct
  source 1..75: mol_type = other DNA
aatacaaacaagagcttgcacaaattagtagcttcaatgattttctgagtgttccacgagaatttagcaaggctg

SEQ ID NO: 890610 - DNA, 75 bp, synthetic construct
  source 1..75: mol_type = other DNA
aaattggtaaagtgattgcagatttacaaggatgccaaagacttattcgcacagagagagctattagagcgccac

SEQ ID NO: 890611 - DNA, 75 bp, synthetic construct
  source 1..75: mol_type = other DNA
cttctccagtcgtggtcgcgtttattcgatgaaggtttatcagttgcctgaagcctctcgtggtgcgcgtggtcg

SEQ ID NO: 890612 - DNA, 75 bp, synthetic construct
  source 1..75: mol_type = other DNA
ctggcattttttacaggtgctggaacaatggatatgacagcgctgactcaaaatggtagggaaattttaagtaaa

SEQ ID NO: 890613 - DNA, 75 bp, synthetic construct
  source 1..75: mol_type = other DNA
cattctgaatgataaacaggataaaaatgataatctgacatcattgtcgagcttaacaggaataccggatgggct

SEQ ID NO: 890614 - DNA, 75 bp, synthetic construct
  source 1..75: mol_type = other DNA
tggaacacatcccgggaccagacttcccgacggcagcaatcatcaacggtcgtcgtggcattgaagaagcttacc

SEQ ID NO: 890615 - DNA, 75 bp, synthetic construct
  source 1..75: mol_type = other DNA
gggaattttaggtttttgtattttgaatgggttgattatatatctgatgaaacgctgcgataaatctaaaatcaa

SEQ ID NO: 890616 - DNA, 75 bp, synthetic construct
  source 1..75: mol_type = other DNA
ggacacagctcgaccgccagttacaggatgcgctcgaaaaatacgagcgggataaacgtgcgcgcgcccgtgcca

SEQ ID NO: 890617 - DNA, 75 bp, synthetic construct
  source 1..75: mol_type = other DNA
ctttcattctaaaagacttagagaaatgggatatactgaggaaatgctaattagtcatccatgtctttctgtaca

SEQ ID NO: 890618 - DNA, 75 bp, synthetic construct
  source 1..75: mol_type = other DNA
tatacccttgatgatgttgcgtatcgtcgaatggaggggtacgaatatgattacgattacgacggtgagcatcgc

SEQ ID NO: 890619 - DNA, 75 bp, synthetic construct
  source 1..75: mol_type = other DNA
ggcaagcttcttacggtacgttgggagtgggttataactatgatcgcgaccaacatgattttaactggcaactcg

SEQ ID NO: 890620 - DNA, 75 bp, synthetic construct
  source 1..75: mol_type = other DNA
taatggccaaaatagctggttggcgggcgttggcggtaccttactggaagggcacaacctgagctatcacgttac

SEQ ID NO: 890621 - DNA, 75 bp, synthetic construct
  source 1..75: mol_type = other DNA
cacgctggatgcgtggaaggctctggtgaaaaagaatgtccatggatggccacagatttttgcattgtgttctgc

SEQ ID NO: 890622 - DNA, 75 bp, synthetic construct
  source 1..75: mol_type = other DNA
atgccgttgcttgatgaggatgcgcataccccatacaaccactgggggtacacggataagaacgataacatgatg

SEQ ID NO: 890623 - DNA, 75 bp, synthetic construct
  source 1..75: mol_type = other DNA
caaaccgtgctcacccaactacaggcgattgcgccctaccccagccagtggtacgcccatcgtggaacgatccgg

SEQ ID NO: 890624 - DNA, 75 bp, synthetic construct
  source 1..75: mol_type = other DNA
tctgggtgatctgccgcaggaaaagaattgctttatcattaatcggattgaactggaagataactttctgggtgg

SEQ ID NO: 890625 - DNA, 75 bp, synthetic construct
  source 1..75: mol_type = other DNA
aagaagggctagagcgagcgaagaaagaaggtaaaaagctgggtcgcccggttgctacggcgacgtacaaacgtg

SEQ ID NO: 890626 - DNA, 75 bp, synthetic construct
  source 1..75: mol_type = other DNA
ggaagggaagaagttaggccgtccggttgcgtcagatacccttcagcgtgtacaggaagccagagctaaggggct

SEQ ID NO: 890627 - DNA, 75 bp, synthetic construct
  source 1..75: mol_type = other DNA
tccgatcgtcaacctgctgccgctggagcaggacgaacgtatcactgcgatcctgccggtgaccgagtttgaaga

SEQ ID NO: 890628 - DNA, 75 bp, synthetic construct
  source 1..75: mol_type = other DNA
gatcataagataagtgatctaaacaatagccttgttcgctatttttctgtcttatcacaacaattttctgatcat

SEQ ID NO: 890629 - DNA, 75 bp, synthetic construct
  source 1..75: mol_type = other DNA
aggttcacaccttaaatgaggttactatacttttaaaagaattaataaaagtctcttggttatcagttaacaggg

SEQ ID NO: 890630 - DNA, 75 bp, synthetic construct
  source 1..75: mol_type = other DNA
gtgtttcgaccagtgaacagacgaccgaaaaccaaattgtagccatccgtcaggccggttatgacgttccagaca

SEQ ID NO: 890631 - DNA, 75 bp, synthetic construct
  source 1..75: mol_type = other DNA
aggcgtgaaagtcttcatggcgaccgctaacggtactgtgaagaaaaccgtcctcaccgagttcaaccgtctgcg

SEQ ID NO: 890632 - DNA, 75 bp, synthetic construct
  source 1..75: mol_type = other DNA
caaaaaacaacaaactgaaagatattttaatcaagaatgaaatttatgtgcctacatattggaaagatgtattga

SEQ ID NO: 890633 - DNA, 75 bp, synthetic construct
  source 1..75: mol_type = other DNA
acaacggtattgataacctgtttaacaccatcatcaccgacagccgggccgggaaaaaacgctactctgtccatc

SEQ ID NO: 890634 - DNA, 75 bp, synthetic construct
  source 1..75: mol_type = other DNA
tacattggtctgggacaaagacggcactatcagtgcttcctcagtgttttttggcaccattatgttcctgtattc

SEQ ID NO: 890635 - DNA, 75 bp, synthetic construct
  source 1..75: mol_type = other DNA
tgggtggaggtagtgaaccgtaaggctagctacgtggccacggcgatgacaggtatgcgccggttgcgcgcgttg

SEQ ID NO: 890636 - DNA, 75 bp, synthetic construct
  source 1..75: mol_type = other DNA
atgatgaagctgattaatcgcagtaagcaatcacctattggtcgccgcgcttgcgatgttgcgctggcggctcac

SEQ ID NO: 890637 - DNA, 75 bp, synthetic construct
  source 1..75: mol_type = other DNA
tgcgaatcctatatttcaattctcaaattcaatagatattgataaggagcgtaaaaccttagtagaagtatttga

SEQ ID NO: 890638 - DNA, 75 bp, synthetic construct
  source 1..75: mol_type = other DNA
gataattatgttgtcgatctcagcgccataaacaaaagttggttcgatatcaacgaggaagtatatcaatctctt

SEQ ID NO: 890639 - DNA, 75 bp, synthetic construct
  source 1..75: mol_type = other DNA
cgatgataagttgaacgttgtttcaaatgaaggccaaattgattttatgcgctcgggttctgaagcgacacgctt

SEQ ID NO: 890640 - DNA, 75 bp, synthetic construct
  source 1..75: mol_type = other DNA
caggaaagctgtaaaaaaatccaagcgattttagcagttgagaaagttgacgataattctgcaggaaacattatt

SEQ ID NO: 890641 - DNA, 75 bp, synthetic construct
  source 1..75: mol_type = other DNA
tcgataattgcattgctcattctttgtggcgtagtgttggcgattaatctgttttttctgcgcttctccaagcgg

SEQ ID NO: 890642 - DNA, 75 bp, synthetic construct
  source 1..75: mol_type = other DNA
tcactctagaggcctaattggcatattgaagttaatatgcataggctctgcgtgcttaattctaattggtataat

SEQ ID NO: 890643 - DNA, 75 bp, synthetic construct
  source 1..75: mol_type = other DNA
gggtttatcccaagattcatatggcctgacaaaccaattgtcacaatgaatagctcatattactttaccgtgagt

SEQ ID NO: 890644 - DNA, 75 bp, synthetic construct
  source 1..75: mol_type = other DNA
accaggtgaacatgcatcaggaaaacacaatgccttccacgccggatatcggtttctttattcacagaccaaagt

SEQ ID NO: 890645 - DNA, 75 bp, synthetic construct
  source 1..75: mol_type = other DNA
accatttcgctcgattagagaaagtaagaaagaaaaacaatttaacggggattgctgttgatgatttctctgtta

SEQ ID NO: 890646 - DNA, 75 bp, synthetic construct
  source 1..75: mol_type = other DNA
caggcaaaaaaagcaaaaatatttaaaccccgagataattttataaatcttttaaattcaatgtttggaggacga

SEQ ID NO: 890647 - DNA, 75 bp, synthetic construct
  source 1..75: mol_type = other DNA
gcacagataaaatgattaagcatgtatcagacctgctcgttaaagaaaacggattcggtgatattcataatccaa

SEQ ID NO: 890648 - DNA, 75 bp, synthetic construct
  source 1..75: mol_type = other DNA
cgatttgattgttggtcggtattttaatccagatgataaatcattaaagataaattataccgctcttgataaaga

SEQ ID NO: 890649 - DNA, 75 bp, synthetic construct
  source 1..75: mol_type = other DNA
gcattgttaactgcaagcattgaaaaaaaatacatgagattacctcgtttcctaatgcttgatggaattgacgat

SEQ ID NO: 890650 - DNA, 75 bp, synthetic construct
  source 1..75: mol_type = other DNA
taaggcacaggcccacgtctttaagcagtacatcatcgacttcgccaaagaagtggaggtggagctgaaaggcga

SEQ ID NO: 890651 - DNA, 75 bp, synthetic construct
  source 1..75: mol_type = other DNA
accccgtttaaaggcgtgtttaacgtcaggcttgatccagaactgcatcgtcgggtagcagaaatggcgatggaa

SEQ ID NO: 890652 - DNA, 75 bp, synthetic construct
  source 1..75: mol_type = other DNA
gggtcgctgaaatggcgatggaagaagatttatcactgaacgcctttgttaataaggcgctggaaaaagaagtca

SEQ ID NO: 890653 - DNA, 75 bp, synthetic construct
  source 1..75: mol_type = other DNA
gtagatcttgatttactacgtaatttcaatggggtgccaggtttaaacagagataactttatttatatcagcaat

SEQ ID NO: 890654 - DNA, 75 bp, synthetic construct
  source 1..75: mol_type = other DNA
tggtgatgagcagaatcattacccgtctgcccggattggatatttcatgtcctgaaacagactctttgaaccgcc

SEQ ID NO: 890655 - DNA, 75 bp, synthetic construct
  source 1..75: mol_type = other DNA
tgaaattcataaaaataaaatgatcgaacattatgttattgccacgtcaaatgatgttattgatgttttatcaac

SEQ ID NO: 890656 - DNA, 75 bp, synthetic construct
  source 1..75: mol_type = other DNA
acttgagccgtcgtcgtggtatgctcaaaggtcaggaatctgaagttactggcgttaagatccacgctgaagtac

SEQ ID NO: 890657 - DNA, 75 bp, synthetic construct
  source 1..75: mol_type = other DNA
tgatggcgttattgtttacgccagaactgacgccggcattggcgtgaagcagcaaaattacgcagggattaagga

SEQ ID NO: 890658 - DNA, 75 bp, synthetic construct
  source 1..75: mol_type = other DNA
agtagtgtttctaaatcatggggatcggttgctcttggtttagattctgttgctgagcgtgccgctgaaagtcat

SEQ ID NO: 890659 - DNA, 75 bp, synthetic construct
  source 1..75: mol_type = other DNA
gcgagaaagttgcaactgttcacagctggaagaaacgcgacaagtggggtgactatgggccactggatcagatgc

SEQ ID NO: 890660 - DNA, 75 bp, synthetic construct
  source 1..75: mol_type = other DNA
attacctgccatccccggttgacgtacctgcgatcaacggtatcctggacgacggtaaagacactccggctgaac

SEQ ID NO: 890661 - DNA, 75 bp, synthetic construct
  source 1..75: mol_type = other DNA
tcaaaaaactgaccgaacagtacaacgtgacatatatcggcatcgactcgacgggtgtcggtcacggggtttacg

SEQ ID NO: 890662 - DNA, 75 bp, synthetic construct
  source 1..75: mol_type = other DNA
gtcgatcttgatttactacgtaattttaatggggtgccagggttaaatcgagaaaactttatttatatcagcaat

SEQ ID NO: 890663 - DNA, 75 bp, synthetic construct
  source 1..75: mol_type = other DNA
aaggcgtcaacaaagaggcttatgtccgagaatcttcacgataacaacgctgttgctgatgagttaataacgaga

SEQ ID NO: 890664 - DNA, 75 bp, synthetic construct
  source 1..75: mol_type = other DNA
gcgattacaatagatggcgccgtcacagtgcctgtggaggtctcagcccggcacagtttgaaaatcagaacctcg

SEQ ID NO: 890665 - DNA, 75 bp, synthetic construct
  source 1..75: mol_type = other DNA
gccaacggtaatgattggtcattcgctgggcgaatgggtggcagcgacgttggcaggcgtgttctctttagagga

SEQ ID NO: 890666 - DNA, 75 bp, synthetic construct
  source 1..75: mol_type = other DNA
ggaatacacaccggcgcgaaaagttcatttttaccactgcgaccaccggggcctgccgctggcgctcatcagcga

SEQ ID NO: 890667 - DNA, 75 bp, synthetic construct
  source 1..75: mol_type = other DNA
acactaaaatgcattaagccactgcattcaatgggcggaactggtgaaagaagcggtccagatatatgggggaat

SEQ ID NO: 890668 - DNA, 75 bp, synthetic construct
  source 1..75: mol_type = other DNA
accgctattatgacccgctgcgggggcggtatatcactcaggatccgattgggctgaaggggggatggaattttt

SEQ ID NO: 890669 - DNA, 75 bp, synthetic construct
  source 1..75: mol_type = other DNA
ggttgagcatcccctggttcgtcatatcacccaacgtctgatgtggggcatttatgacgctgataatcagcttat

SEQ ID NO: 890670 - DNA, 75 bp, synthetic construct
  source 1..75: mol_type = other DNA
ggcacttccggattcagctatcctgcaactgtgcaccatgctctcttttccccgcgaagccaccctttacccggg

SEQ ID NO: 890671 - DNA, 75 bp, synthetic construct
  source 1..75: mol_type = other DNA
gaaaaaattgctcataagaatgaattacccagtatattgatcgccccttcatggttggaaaaaaagaaaaagatt

SEQ ID NO: 890672 - DNA, 75 bp, synthetic construct
  source 1..75: mol_type = other DNA
tgggtcgacagtccagaagaacagaggagcgccgtaacgccggtggcggacgcgggaagtgtcatccctagcgaa

SEQ ID NO: 890673 - DNA, 75 bp, synthetic construct
  source 1..75: mol_type = other DNA
cactgatcgtctttacagattccaggtcaatggtcgccctgacttaaacaaaatgcacacggccattgatatggg

SEQ ID NO: 890674 - DNA, 75 bp, synthetic construct
  source 1..75: mol_type = other DNA
gtgttatttcccggcctcggtatttgcaatggatattctgggcaacgtagtagaagaagcaggtctgggtcagga

SEQ ID NO: 890675 - DNA, 75 bp, synthetic construct
  source 1..75: mol_type = other DNA
cactggtcatggccttcacgttcaacgttaacgcagcaccagatccgaagtattgccagttagcagcagatgtaa

SEQ ID NO: 890676 - DNA, 75 bp, synthetic construct
  source 1..75: mol_type = other DNA
agcgcctattcggtggcgcggtggtgctggaagtcgccgacggctgcccggatgtcaaaccacttgaatcagagt

SEQ ID NO: 890677 - DNA, 75 bp, synthetic construct
  source 1..75: mol_type = other DNA
atcggagtgggcgaagaagcctgaatgctgggagtatgtccgcagtaaaatctatttctccgcacatggaaaaat

SEQ ID NO: 890678 - DNA, 75 bp, synthetic construct
  source 1..75: mol_type = other DNA
cctgcttcctattgctgcgatggatcggattatggctgcactgcgtaaagcgtcaggtaacgaatcgttcagcat

SEQ ID NO: 890679 - DNA, 75 bp, synthetic construct
  source 1..75: mol_type = other DNA
cttgattgacttaaaaccagaagatttaaaagatccacttgctcaattcaatcacacaacgccaaataaagagag

SEQ ID NO: 890680 - DNA, 75 bp, synthetic construct
  source 1..75: mol_type = other DNA
caagttcatcaagtatttcgctgatgagctgaaggctaagcgccagccaggtatctgggtgcgcatggactacgg

SEQ ID NO: 890681 - DNA, 75 bp, synthetic construct
  source 1..75: mol_type = other DNA
caagttcattacgtactttgctgcgcaactgaaggccaagaagcagcccggtatctgggttcgcatggactacgg

SEQ ID NO: 890682 - DNA, 75 bp, synthetic construct
  source 1..75: mol_type = other DNA
tggtcgcgctggtgctcagcatggccctggcaccgctactgatccgccatccacgatgtacttgcccggttcttg

SEQ ID NO: 890683 - DNA, 75 bp, synthetic construct
  source 1..75: mol_type = other DNA
tggtcgcgctggtgctcagcatggccctggcaccgctactgatccgccatcacgatgtacttgcccggttcttga

SEQ ID NO: 890684 - DNA, 75 bp, synthetic construct
  source 1..75: mol_type = other DNA
agtctcgattggctttgcaccaggaaccgctgcgtcatccatcaccatgcccttattacaggcggttcgcgctga

SEQ ID NO: 890685 - DNA, 75 bp, synthetic construct
  source 1..75: mol_type = other DNA
tgtgggggagaggtgacgcaaaaaagcaacattttgacccaaaatgtaaacccaatctttgtttagaaattctcg

SEQ ID NO: 890686 - DNA, 75 bp, synthetic construct
  source 1..75: mol_type = other DNA
aataaatgttaaacatttcaatgataacccgtggttatttgtttcccgaacaggaaaaccattatcgagacaacg

SEQ ID NO: 890687 - DNA, 75 bp, synthetic construct
  source 1..75: mol_type = other DNA
ccggcggtgaaggggcgaccggatgatgtggccggcaaggtggagtggcagagggccggcaacaggctgaagggg

SEQ ID NO: 890688 - DNA, 75 bp, synthetic construct
  source 1..75: mol_type = other DNA
ctgatcccttttttagtttttccccttctggcacacaatctgagcagttataacgctgactattctttgtatgtc

SEQ ID NO: 890689 - DNA, 75 bp, synthetic construct
  source 1..75: mol_type = other DNA
gcgaggagcaggcggagaagctgaaacagctatttctggacgggctgtatccgcaccagaaacactggtaccgcg

SEQ ID NO: 890690 - DNA, 75 bp, synthetic construct
  source 1..75: mol_type = other DNA
cggcacgacggaagggatcaatctggtcgccaatagctgggcaacagcaatgtgcgggcgggcgataacatcatc

SEQ ID NO: 890691 - DNA, 75 bp, synthetic construct
  source 1..75: mol_type = other DNA
cgccgctacagctcatattgcggagaaatcggaccggctccggataaccttatcgccagagattttaaggcggag

SEQ ID NO: 890692 - DNA, 75 bp, synthetic construct
  source 1..75: mol_type = other DNA
atataccaatggctattgttggctcaccggattatttttctcgccgaagtgttccaacgtcagtgtcacaattaa

SEQ ID NO: 890693 - DNA, 75 bp, synthetic construct
  source 1..75: mol_type = other DNA
tcgtacatgcggctaaggcgctcgacagtgaaagcctgctgctcatcgcggatttttttaaagaacctttctttc

SEQ ID NO: 890694 - DNA, 75 bp, synthetic construct
  source 1..75: mol_type = other DNA
tccaaagcgcaggcgcaccagttccgccagtacattgtcgattttgcccgtgaggttgatgttgagttgaaaggc

SEQ ID NO: 890695 - DNA, 75 bp, synthetic construct
  source 1..75: mol_type = other DNA
ttatacgggagactttcctgccggggaagaagtttttgagttactgaaaaatattttgtcagaaaaccggatgtc

SEQ ID NO: 890696 - DNA, 75 bp, synthetic construct
  source 1..75: mol_type = other DNA
ctgatccagacaaagtcgaatgatgtttctattttctatattttccgccaactcagttttatttgtttaacctcg

SEQ ID NO: 890697 - DNA, 75 bp, synthetic construct
  source 1..75: mol_type = other DNA
actcagttttatttgtttaacctcgctggcgctcttttgttatggaaaagacaacatccttgacaacaataagaa

SEQ ID NO: 890698 - DNA, 75 bp, synthetic construct
  source 1..75: mol_type = other DNA
attaccagtgttatggctatcgtcgcctgcatgcgatgctcaggcatgaggggggtcggctatcagaaaaggttg

SEQ ID NO: 890699 - DNA, 75 bp, synthetic construct
  source 1..75: mol_type = other DNA
acaatggaggcttgatgatgtatctgcagctatctttatgagcacatcaacgcttaaaagaaagctggctacaga

SEQ ID NO: 890700 - DNA, 75 bp, synthetic construct
  source 1..75: mol_type = other DNA
cttaagtgaaaagccagcattgccagaacttgaggctgtatctgaagcactgaaacaagccgtaatcagagacct

SEQ ID NO: 890701 - DNA, 75 bp, synthetic construct
  source 1..75: mol_type = other DNA
tcggcggtcaaacgcctgatgaactgctacggcggttcactcaaccagtatggctcctacagcaccgcgcaaatt

SEQ ID NO: 890702 - DNA, 75 bp, synthetic construct
  source 1..75: mol_type = other DNA
cttccagatttacatggatgaattgcacgacatgctggaggacgccagcgacatgattgatgagatattcgagct

SEQ ID NO: 890703 - DNA, 75 bp, synthetic construct
  source 1..75: mol_type = other DNA
gcggtattcaagagcaaggcgtcctcagcattcgttggtttgaaaacaaccagcccgttgagtgtctggccaatt

SEQ ID NO: 890704 - DNA, 75 bp, synthetic construct
  source 1..75: mol_type = other DNA
tcgctaaggagctaacgggcgagcaatttaaagttctaatgctcatgctcgctgatctggattacgagaatttca

SEQ ID NO: 890705 - DNA, 75 bp, synthetic construct
  source 1..75: mol_type = other DNA
gttgaggagcagggcggcattcaggtgctgctggaaaaactgcaaagtggcggcttaggggccattctctcaacc

SEQ ID NO: 890706 - DNA, 75 bp, synthetic construct
  source 1..75: mol_type = other DNA
ggctgccggtcgtgaagacgaatggcttcctattcgcccgggcaccgatgccgcgctggttgcgggtattgccta

SEQ ID NO: 890707 - DNA, 75 bp, synthetic construct
  source 1..75: mol_type = other DNA
aagagcagcgcgaatggtggagtagatcccctaattcaattaactgcaaatgtagcacgattaccgtattagttg

SEQ ID NO: 890708 - DNA, 75 bp, synthetic construct
  source 1..75: mol_type = other DNA
gtggcgtgattactaatgacccacaagagcacgtggcctgccagtcgtaccgttttgtgatggtgggcatcgcta

SEQ ID NO: 890709 - DNA, 75 bp, synthetic construct
  source 1..75: mol_type = other DNA
gagaaaagatcggctacgggatgggcgacgcaggatgcaacatcatctttggcgctatcatgctgtttgttaact

SEQ ID NO: 890710 - DNA, 75 bp, synthetic construct
  source 1..75: mol_type = other DNA
caagagggtgacctctttgtcagcggtggtgcgaagggtattgatgtcactggtaatagtaccattatcagcaat

SEQ ID NO: 890711 - DNA, 75 bp, synthetic construct
  source 1..75: mol_type = other DNA
ccggtactattagcaatgttgtgcaaaaatccggcgtctttaataacagtggtacagtgagtaaacgtattattc

SEQ ID NO: 890712 - DNA, 75 bp, synthetic construct
  source 1..75: mol_type = other DNA
ggcgatacacccgtcccgccggatgatggcggtgatacacccgtcccgccagatgatggcggcgacacacctgtc

SEQ ID NO: 890713 - DNA, 75 bp, synthetic construct
  source 1..75: mol_type = other DNA
tctatcgcattaattgttactgattatggattcagcttatcaggacctctgtttgtggctgtaaataagcataat

SEQ ID NO: 890714 - DNA, 75 bp, synthetic construct
  source 1..75: mol_type = other DNA
aaggaatataaaataacgcgtttatttgagcaagtgcaggacaatggagcgcatgcgctgaataacgatgtaact

SEQ ID NO: 890715 - DNA, 75 bp, synthetic construct
  source 1..75: mol_type = other DNA
atatctcgtctgagagtgatccgaatgaagaggagtttctccatttcttaattaatgggggagatgccgctgtaa

SEQ ID NO: 890716 - DNA, 75 bp, synthetic construct
  source 1..75: mol_type = other DNA
ttcaatatatgcgcaaaggtcaggatcgccctgatgatgatggagaggttgtagggtgtaattcagaagacaact

SEQ ID NO: 890717 - DNA, 75 bp, synthetic construct
  source 1..75: mol_type = other DNA
aattgtctgaatcagttgcagttaagtattcagatatagttgtttctgataatcaagttattgtcgattatgtaa

SEQ ID NO: 890718 - DNA, 75 bp, synthetic construct
  source 1..75: mol_type = other DNA
tactcgagtaagtgaagaccatgttatttgcaacatcaatattgttgttgaagaggttgaagactcggtgtgggg

SEQ ID NO: 890719 - DNA, 75 bp, synthetic construct
  source 1..75: mol_type = other DNA
tatagtcatggttcaaaaaaacaacgtaactcagggttagaaataagtaagcaattaatggctattatgccagaa

SEQ ID NO: 890720 - DNA, 75 bp, synthetic construct
  source 1..75: mol_type = other DNA
ttccatagcctatttaagaaaatggcttaccactacaatagcaacgcaaagtagagaatacctctcatggttaaa

SEQ ID NO: 890721 - DNA, 75 bp, synthetic construct
  source 1..75: mol_type = other DNA
aagaacgggccgctaaccgcaataactggatgtatggcgctgatgaatgagcgggaacaaaaccgccttatccgt

SEQ ID NO: 890722 - DNA, 75 bp, synthetic construct
  source 1..75: mol_type = other DNA
atgctttatcgccaatatctcaagcattatatccatatttagcaaggtctggcgataagaaaactttatataaat

SEQ ID NO: 890723 - DNA, 75 bp, synthetic construct
  source 1..75: mol_type = other DNA
atattgcgatggctgaagcgggtattccgcgcggtaccggaatgggttacggcggctgcggtggtggcggtcata

SEQ ID NO: 890724 - DNA, 75 bp, synthetic construct
  source 1..75: mol_type = other DNA
tccgcgcggagccggaatgggaatgggcatgggctacggcggctgcggtggtggcggtcatatgggtatgggcca

SEQ ID NO: 890725 - DNA, 75 bp, synthetic construct
  source 1..75: mol_type = other DNA
atccagggtatgactttaatgatgaaattatgaaacctgcagtgactttctgggccacactgacagaacgctttc

SEQ ID NO: 890726 - DNA, 75 bp, synthetic construct
  source 1..75: mol_type = other DNA
gttatgacgttcacaaccttgacagcagccgttcgattgcatttagcaacacgaacaaaactgctgataccgacg

SEQ ID NO: 890727 - DNA, 75 bp, synthetic construct
  source 1..75: mol_type = other DNA
ggagcgcaggtaaatattgttcgggaaaagttgttatccggcattgtctggcttgattctttccttgtgacaaca

SEQ ID NO: 890728 - DNA, 75 bp, synthetic construct
  source 1..75: mol_type = other DNA
aatgtatttggattaagtttcttagactacgtcatcaagtcaagaactttattatgcgctagacttacccgtaat

SEQ ID NO: 890729 - DNA, 75 bp, synthetic construct
  source 1..75: mol_type = other DNA
gtcattagttggtaaaaaactatcaagaccatcatcatcttatgctggaataccattgagactcattcgtgagta

SEQ ID NO: 890730 - DNA, 75 bp, synthetic construct
  source 1..75: mol_type = other DNA
ctagatcaggccatttacgttcttcacgccaccagtgaccacctgagaaaaatgccgccgctgtacgagctggaa

SEQ ID NO: 890731 - DNA, 75 bp, synthetic construct
  source 1..75: mol_type = other DNA
tcggtcaatttttgtccgaactaaataaagaatcagatcgtggctctgttctaatagcagcatccattttcgatg

SEQ ID NO: 890732 - DNA, 75 bp, synthetic construct
  source 1..75: mol_type = other DNA
atgtctgtagtgatatcaggtgcgctgatagatggcgcaggcatccccatgtccggatgccacataattctgaaa

SEQ ID NO: 890733 - DNA, 75 bp, synthetic construct
  source 1..75: mol_type = other DNA
ctgatcaggcttgggcatggcactccgactgagaatccccatgtcgactgggtcagcgaagagttcgatgccgac

SEQ ID NO: 890734 - DNA, 75 bp, synthetic construct
  source 1..75: mol_type = other DNA
cgactgagaatccccatgtcgactgggtcagcgaagagttcgatgccgactgggattacacagtcgcccttagaa

SEQ ID NO: 890735 - DNA, 75 bp, synthetic construct
  source 1..75: mol_type = other DNA
gacctttgcaaagatcattgccagactggttccccatacgttcagtcgcaatggggtccctgttaagcctacgga

SEQ ID NO: 890736 - DNA, 75 bp, synthetic construct
  source 1..75: mol_type = other DNA
acaataaacaaaggttctgtaataccatatgggtgtattattggcactaagtcattagttggtaaaaaactatca

SEQ ID NO: 890737 - DNA, 75 bp, synthetic construct
  source 1..75: mol_type = other DNA
gtcattagttggtaaaaaactatcaagaccatcatcatcttatgctggaataccattgagactcatccgtgaggg

SEQ ID NO: 890738 - DNA, 75 bp, synthetic construct
  source 1..75: mol_type = other DNA
actgccgaccaattcaatgctggaaaactgcgctttttgctctgcacctccacgatcattgaaggagtcaacact

SEQ ID NO: 890739 - DNA, 75 bp, synthetic construct
  source 1..75: mol_type = other DNA
gatcaagccttcagaaggcatggatgagatgaagtacgatatgtgcggtgcggcagcggtttacggtgtgatgcg

SEQ ID NO: 890740 - DNA, 75 bp, synthetic construct
  source 1..75: mol_type = other DNA
cagcaggcgtttggtgaacgctggctatcgacgcaggaaagtaacgcgttgttcctggctgcccgtacgattcag

SEQ ID NO: 890741 - DNA, 75 bp, synthetic construct
  source 1..75: mol_type = other DNA
aacaaaaaacagacacaccggaagaccaacagaagttaaagtcaaaagaagatgtgaaaaaagcaaaagccagac

SEQ ID NO: 890742 - DNA, 75 bp, synthetic construct
  source 1..75: mol_type = other DNA
gaagagatcagaaaactgggtaaaggcgatcatctggtgaagctgaaaaccagcccgcaggcacgaaaaaagtgg

SEQ ID NO: 890743 - DNA, 75 bp, synthetic construct
  source 1..75: mol_type = other DNA
gctggggaacaataccgagtacgacatgctggcattgcgtaaaaccatcgacctgagcgaaagccagacgatgag

SEQ ID NO: 890744 - DNA, 75 bp, synthetic construct
  source 1..75: mol_type = other DNA
catcagcggtgtggataacatcgtttcctctactgttgtctggaacgctaaaggcagcaccgatgccagcggcaa

SEQ ID NO: 890745 - DNA, 75 bp, synthetic construct
  source 1..75: mol_type = other DNA
aaaaagagcaggctgatatgggcaagctgaagaaaagtgttcgcggactggtggttgtgcacccaatgaccgcgc

SEQ ID NO: 890746 - DNA, 75 bp, synthetic construct
  source 1..75: mol_type = other DNA
tttcctgatagttacagctgcagctgacaaaggactggttgatattcacgacagacgaccactggtactgctacc

SEQ ID NO: 890747 - DNA, 75 bp, synthetic construct
  source 1..75: mol_type = other DNA
ggatttcatagtgcttatgtacgcgatccggatggcaataaactggcgtttgtattctacgatttggtggaataa

SEQ ID NO: 890748 - DNA, 75 bp, synthetic construct
  source 1..75: mol_type = other DNA
gcagcaaatatctcaattaagggttctaaaattcttgttatgggcttaacttttaaagaaaattgtcctgatctg

SEQ ID NO: 890749 - DNA, 75 bp, synthetic construct
  source 1..75: mol_type = other DNA
gtcgtcggactgagcggaccggctctggcccaatcggcggcaggttctagcccaggtgctgcagcaccctctgcc

SEQ ID NO: 890750 - DNA, 75 bp, synthetic construct
  source 1..75: mol_type = other DNA
cattgtatttttaataacattcctagtggcgattgctccgatttgcttaatgtcctacaataaagactatgggca

SEQ ID NO: 890751 - DNA, 75 bp, synthetic construct
  source 1..75: mol_type = other DNA
atggccgcgataggtagcataccgtttgagcgtggtgacgaagccgaaggatttttgatcgtcactgcggcggca

SEQ ID NO: 890752 - DNA, 75 bp, synthetic construct
  source 1..75: mol_type = other DNA
gaattaataattgatggtaaaactggatatctatatgaattaggtaatatcgaccagttgaaagaaaaaatgtta

SEQ ID NO: 890753 - DNA, 75 bp, synthetic construct
  source 1..75: mol_type = other DNA
atgtggagttcggcaattaacagccgcaacagcgtgaacactgatgcgggagctggctttgagcaaacattgacg

SEQ ID NO: 890754 - DNA, 75 bp, synthetic construct
  source 1..75: mol_type = other DNA
aaaaagaggcttaaagagtctgatgaacttcttaaatgggcaaggaaaaacttgcaaacaacaggttgcgaatca

SEQ ID NO: 890755 - DNA, 75 bp, synthetic construct
  source 1..75: mol_type = other DNA
atatggtcgttgatgcttctggcggcacttccgttgatgcgcacaaatatgccatcgaccgcatggttcaggctg

SEQ ID NO: 890756 - DNA, 75 bp, synthetic construct
  source 1..75: mol_type = other DNA
cttgcgaatggcgtgcctcgtgagaatattattttgattaataccaagccgctcggtttaaaaattcttggtggc

SEQ ID NO: 890757 - DNA, 75 bp, synthetic construct
  source 1..75: mol_type = other DNA
cgcacaacctgacggaagtcatcaatggttgtctggcgtatatcgatgatgaagacatcagcattgaagggctga

SEQ ID NO: 890758 - DNA, 75 bp, synthetic construct
  source 1..75: mol_type = other DNA
ctgctcagtttataacgtggctaaataatcagggtgcattttcaaacaaatattggattgcacggtgctcatggg

SEQ ID NO: 890759 - DNA, 75 bp, synthetic construct
  source 1..75: mol_type = other DNA
ctgcgcgtccggaatggctggagccagagttcggcgtgcgtgatggtctgtactacctgaccgaacagcaagctc

SEQ ID NO: 890760 - DNA, 75 bp, synthetic construct
  source 1..75: mol_type = other DNA
cgaccagacaggcgtcagcagcgaagggtagcgccacgacggcatccacgaaggcgacagaggcagctggcagtg

SEQ ID NO: 890761 - DNA, 75 bp, synthetic construct
  source 1..75: mol_type = other DNA
tttataaggataacgattaatcatgtttgtcataactatgacaagttaaccgcgcaggaaggccatcatgggaat

SEQ ID NO: 890762 - DNA, 75 bp, synthetic construct
  source 1..75: mol_type = other DNA
gcagcgttttgaaaacgcctcaaaggatagcaccgaatttacaaaaagaattaacgtgatcggtgtgaccgacca

SEQ ID NO: 890763 - DNA, 75 bp, synthetic construct
  source 1..75: mol_type = other DNA
cgccgtggcatcgaagaagcttaccgtaccggtcgcggtaaggtgtacatccgtgcgcgtgccgaagtggaggtt

SEQ ID NO: 890764 - DNA, 75 bp, synthetic construct
  source 1..75: mol_type = other DNA
tccgctgccaactccctgttaggattttgcgtagccagtgctctgattggttgcatcatcggcggtgccctcggt

SEQ ID NO: 890765 - DNA, 75 bp, synthetic construct
  source 1..75: mol_type = other DNA
ttttgccggccttttcagtgccctgctcaccctgccatcactgccgccactgtccccggatggtcagaatgcccg

SEQ ID NO: 890766 - DNA, 75 bp, synthetic construct
  source 1..75: mol_type = other DNA
gataatccgcagactctcatcggtctgacaccggcagcacaaaagaatattcgtctgatacgggcggtaatgcag

SEQ ID NO: 890767 - DNA, 75 bp, synthetic construct
  source 1..75: mol_type = other DNA
taacggtcagtatctggcagaacaggcggcggaaaaatacggtgatgaagttgagcaggtgcagctttccgtcaa

SEQ ID NO: 890768 - DNA, 75 bp, synthetic construct
  source 1..75: mol_type = other DNA
tgtataagtacctagttggaattggtgataccgacccaatgttttccatcatagtatcttcaatgaagatggtgg

SEQ ID NO: 890769 - DNA, 75 bp, synthetic construct
  source 1..75: mol_type = other DNA
tcacctctataaacccggacaacacagtccctatttatctggcaggttatgtcccggaatttgttatttatcgta

SEQ ID NO: 890770 - DNA, 75 bp, synthetic construct
  source 1..75: mol_type = other DNA
atgaagccaactaccccatttaaaaatcccggcgcggtccgggatacctccccccctcatcagcagcctgatatt

SEQ ID NO: 890771 - DNA, 75 bp, synthetic construct
  source 1..75: mol_type = other DNA
caaaaggaaaagctacgaaaagaacaggctcccacacaggggaaaagtaacagtctgagcctttcacgatcaatt

SEQ ID NO: 890772 - DNA, 75 bp, synthetic construct
  source 1..75: mol_type = other DNA
aagttagaacgtctaaagctacttcaaaatgatcccctcgtcaacgagtttgataaagggcctggcgtctgctga

SEQ ID NO: 890773 - DNA, 75 bp, synthetic construct
  source 1..75: mol_type = other DNA
ttggaggaagcgtactggggttaacagtgaaaggtatggcgactaatgcagcaattggtatcagcgtaaactcag

SEQ ID NO: 890774 - DNA, 75 bp, synthetic construct
  source 1..75: mol_type = other DNA
gggtgggcagcataagaaaaaaaaggttaagtgaagtagaatacggtgatataaaaaaagtgtcattatcttctt

SEQ ID NO: 890775 - DNA, 75 bp, synthetic construct
  source 1..75: mol_type = other DNA
gggccgcacagcgagcgcatgagaatctcatgcggaagcaggcgaaagaacagaaagaaaagctacaaagagagc

SEQ ID NO: 890776 - DNA, 75 bp, synthetic construct
  source 1..75: mol_type = other DNA
gaggttctcagcgagggtggttacagcaacaccgagataatcagttataccgaacgtgacgcgcgggaagtaagg

SEQ ID NO: 890777 - DNA, 75 bp, synthetic construct
  source 1..75: mol_type = other DNA
ggaagccacatggggcggactgctcccttcactgctacgggaataccgttacgacagcgcgggtaacgtatcagg

SEQ ID NO: 890778 - DNA, 75 bp, synthetic construct
  source 1..75: mol_type = other DNA
ctagatgccggtattattgatatcacatctcctacaaaccaatatggattacatccagttattgaaggatttgat

SEQ ID NO: 890779 - DNA, 75 bp, synthetic construct
  source 1..75: mol_type = other DNA
ttatctaaaatgatgaatagctccagtgatctcatgggggttgagaaggcagccccagaacttctggaggctata

SEQ ID NO: 890780 - DNA, 75 bp, synthetic construct
  source 1..75: mol_type = other DNA
gacgtgatgggccgtgaacaccacaccgaatacagcggtcacgacctgccggtgaagatgcgcggccccggcggt

SEQ ID NO: 890781 - DNA, 75 bp, synthetic construct
  source 1..75: mol_type = other DNA
tgttggcggctgggaactagtatttagtcaagctaaatctgactcggctttatcagttattaaacatgctcttta

SEQ ID NO: 890782 - DNA, 75 bp, synthetic construct
  source 1..75: mol_type = other DNA
gaaggcgcagtctgcgggcagacaccggataagcggagagactgaccagtatgccgcaggccaccggctgaaaca

SEQ ID NO: 890783 - DNA, 75 bp, synthetic construct
  source 1..75: mol_type = other DNA
tatttttattgctaatgatcgctcctgttttctatgctgaatatctcaaaatgaatattagttcgctaatggaag

SEQ ID NO: 890784 - DNA, 75 bp, synthetic construct
  source 1..75: mol_type = other DNA
gttttatactacagacccatacgccgagattcaggctgcattggccgggaaaacggttgtacaatccagcaattt

SEQ ID NO: 890785 - DNA, 75 bp, synthetic construct
  source 1..75: mol_type = other DNA
atgaaacagtatggcttttatgttgactcctcgcgttgctcaggctgcaaaacctgccaggtcagttgcaaggat

SEQ ID NO: 890786 - DNA, 75 bp, synthetic construct
  source 1..75: mol_type = other DNA
tctttatcactgcgaccaccggggactgccgctggcgcttatcagcgaagacggcaatacggcgtggagcgcgga

SEQ ID NO: 890787 - DNA, 75 bp, synthetic construct
  source 1..75: mol_type = other DNA
caataacatcgctgaaaatgcgttgcggatggtcagtctgggccgcaaaaactacctgttcttcggttcggatca

SEQ ID NO: 890788 - DNA, 75 bp, synthetic construct
  source 1..75: mol_type = other DNA
ggttgacgaggaagatctggacaccatcgatggcagtgccgcggaaggagacgatgaaatcgctccggaagtgga

SEQ ID NO: 890789 - DNA, 75 bp, synthetic construct
  source 1..75: mol_type = other DNA
ctgaaggcgcagtctgcgggcaggcaccggataagtgaagagactgaccagtatgccggaggccaccggctgaaa

SEQ ID NO: 890790 - DNA, 75 bp, synthetic construct
  source 1..75: mol_type = other DNA
aggaggcgatcgccgtagcaaatactatcacctcaccctcgacacagccaaagagcttgcgatggttgacgactg

SEQ ID NO: 890791 - DNA, 75 bp, synthetic construct
  source 1..75: mol_type = other DNA
attgcaccgcgccactggcggatgcggcgtaaacgccttatccgccctacatgtgcaatcctgtaggccggataa

SEQ ID NO: 890792 - DNA, 75 bp, synthetic construct
  source 1..75: mol_type = other DNA
gcgttgacctgaccagcggtgaagacgaagtgatgctgttctccgccgaaggtaaagtggtgcgctttaaagagt

SEQ ID NO: 890793 - DNA, 75 bp, synthetic construct
  source 1..75: mol_type = other DNA
tacgagatttcaattgatgattctgaagaatcattttttggctattatgaccatagtccaatgagctctaatggg

SEQ ID NO: 890794 - DNA, 75 bp, synthetic construct
  source 1..75: mol_type = other DNA
cgcaagtgccggaaaccatactcatagtgtcacaggcgcatcagcagtcagccagtggtcacaaaatgggtcagt

SEQ ID NO: 890795 - DNA, 75 bp, synthetic construct
  source 1..75: mol_type = other DNA
tcagagaaagttatctggaggcacagaaatacaagaaagaaaagaaccggaagttaggggtgaaggtttttcatg

SEQ ID NO: 890796 - DNA, 75 bp, synthetic construct
  source 1..75: mol_type = other DNA
gatatactaaagctggtgtgtatactccccataatgatattggttacttggtatatgatgtcgtatatggattat

SEQ ID NO: 890797 - DNA, 75 bp, synthetic construct
  source 1..75: mol_type = other DNA
gaaggcaagacggtctggcgaccggaacagaccagcctgtgggggctggcactcagcctgcccgcagacgggaac

SEQ ID NO: 890798 - DNA, 75 bp, synthetic construct
  source 1..75: mol_type = other DNA
atggtgggcgggcgtggcgaaatcaaaaaagacgtggatttcccggaagccggtgaggacacggcgctctgcgac

SEQ ID NO: 890799 - DNA, 75 bp, synthetic construct
  source 1..75: mol_type = other DNA
cagcttgataatgttacgcaaattgtccagcatacgacaaagcttacttctattctggtgatgaaaccctgcaaa

SEQ ID NO: 890800 - DNA, 75 bp, synthetic construct
  source 1..75: mol_type = other DNA
aaccggagagcgggatgtacctggtgagtgatccgctggggttgcaggggggtgagcagacttaccggtatgtgc

SEQ ID NO: 890801 - DNA, 75 bp, synthetic construct
  source 1..75: mol_type = other DNA
gccagggcgacaaactggagtgcagcgcagcaatcgtgggaggttcgccggacgtctttattggcggtgagcagg

SEQ ID NO: 890802 - DNA, 75 bp, synthetic construct
  source 1..75: mol_type = other DNA
ccggggctagttttggcagtggcccttgtgtcggagggcaacctccgttgggaggtgctttaatagacgcaatga

SEQ ID NO: 890803 - DNA, 75 bp, synthetic construct
  source 1..75: mol_type = other DNA
aaccctggcaaaagagatgctggagaatttcggctctctttatggctttttaactctgaatatgaacaatttagt

SEQ ID NO: 890804 - DNA, 75 bp, synthetic construct
  source 1..75: mol_type = other DNA
gtttttcatttgcaggtccttcgcgaggcgatggggttaattatgtgaccattcgtccccgtaacattgcgttta

SEQ ID NO: 890805 - DNA, 75 bp, synthetic construct
  source 1..75: mol_type = other DNA
gtgaagaaaccggacgccaggccgctaatctgataatccgcaaattaaaagacccggagctgcaaattcaaagaa

SEQ ID NO: 890806 - DNA, 75 bp, synthetic construct
  source 1..75: mol_type = other DNA
gaagtgatgtcagctctgccgactcatagtgatacgccgttagtaaatacgctacttactgattttaatcgtgaa

SEQ ID NO: 890807 - DNA, 75 bp, synthetic construct
  source 1..75: mol_type = other DNA
tggtagcctggaactggtgaacacgaactcacccgacgcgccgcgaatacagcgggcgcagcaagccgccgaacg

SEQ ID NO: 890808 - DNA, 75 bp, synthetic construct
  source 1..75: mol_type = other DNA
ctggatatttaaattattctgcagaagaaaatattttacaggattgggatccgcagtttgttgttgttccagcaa

SEQ ID NO: 890809 - DNA, 75 bp, synthetic construct
  source 1..75: mol_type = other DNA
gtgatgctgatgacctcgttcaagggcgcgaaagaggcgatctcactgcatcctacgctgctgccgcagcagtga

SEQ ID NO: 890810 - DNA, 75 bp, synthetic construct
  source 1..75: mol_type = other DNA
ggggcaacagcgtggtacgcagaatacgatgaatggggcaatctgctgagtgaggataacccgcatcatctgcag

SEQ ID NO: 890811 - DNA, 75 bp, synthetic construct
  source 1..75: mol_type = other DNA
gtatgctttcatgcgtttcagatacgccaagtgatgataattcttatggtgtgcttactatttcagtcgcctctg

SEQ ID NO: 890812 - DNA, 75 bp, synthetic construct
  source 1..75: mol_type = other DNA
aagctggaagaccagagcgccaccatacagcagatacagcgggtgcagacagacacaaataacgacctggctgca

SEQ ID NO: 890813 - DNA, 75 bp, synthetic construct
  source 1..75: mol_type = other DNA
cggaaaacagcctcacgcagctggttgcgaaaaagaatgaggaccagacgctggccatcgcgcaggtgagtcagc

SEQ ID NO: 890814 - DNA, 75 bp, synthetic construct
  source 1..75: mol_type = other DNA
gtcgtgatattactgagctttatcattttactcatgcagataatctttcttcaatcatcgctaatggtttggtga

SEQ ID NO: 890815 - DNA, 75 bp, synthetic construct
  source 1..75: mol_type = other DNA
actgggcgaaggcgttcgactatatcctgaatcactggaatgcgctgaacgagttctgtcgtgacggccaggtgg

SEQ ID NO: 890816 - DNA, 75 bp, synthetic construct
  source 1..75: mol_type = other DNA
accaaaagcggtcaaggctgcatacgacctggcagccggcaaggcgccggccagccacactcacccgtggagtca

SEQ ID NO: 890817 - DNA, 75 bp, synthetic construct
  source 1..75: mol_type = other DNA
atcacatatctcaaaattcattcttgagcagattcaagccagattatttcgttacaggaagaataaaccagaata

SEQ ID NO: 890818 - DNA, 75 bp, synthetic construct
  source 1..75: mol_type = other DNA
ctattccatagctatattccctttcaccacttcattgaatacactggatccattaatacttaatcaggaattagt

SEQ ID NO: 890819 - DNA, 75 bp, synthetic construct
  source 1..75: mol_type = other DNA
gctcacagtgaagcgccgagtccggtcagcgccctactctccgccgtattgctgaactgcgcgctgttggtgctg

SEQ ID NO: 890820 - DNA, 75 bp, synthetic construct
  source 1..75: mol_type = other DNA
atggccccgtcaggcaatggcgtgatgcagccgctgcgtgtggtcttctctgcgctatttcgtctacgacaacag

SEQ ID NO: 890821 - DNA, 75 bp, synthetic construct
  source 1..75: mol_type = other DNA
tgattgcatagatagtttttcaagcttatttttaaatatgacacttattaagatttataaaaacactaataaccc

SEQ ID NO: 890822 - DNA, 75 bp, synthetic construct
  source 1..75: mol_type = other DNA
agttcccgttgctttccgcgaatatctaccagaaaagtactggcgagcgcctgtttaaaccgtgggcgctgttta

SEQ ID NO: 890823 - DNA, 75 bp, synthetic construct
  source 1..75: mol_type = other DNA
cggcggtacaaaagcgctatcgcaaccgcgaagcgggcattcctgcactagctggtcgcccggaaaaccagatta

SEQ ID NO: 890824 - DNA, 75 bp, synthetic construct
  source 1..75: mol_type = other DNA
caacttatcaacgatcctaatgacccggcggtacaaaagcgctatcgcaaccgcgaagcgggcattcctgcacta

SEQ ID NO: 890825 - DNA, 75 bp, synthetic construct
  source 1..75: mol_type = other DNA
attaaggtatttgattaccaactggatattcctggtgttcaggcgcaaacccataccctggcaaccggtccggtt

SEQ ID NO: 890826 - DNA, 75 bp, synthetic construct
  source 1..75: mol_type = other DNA
ggaaagaaatccctgatccataccgtaaaagtgatgaggcatttgatttagtataccaattaattaatcaagcat

SEQ ID NO: 890827 - DNA, 75 bp, synthetic construct
  source 1..75: mol_type = other DNA
gatttagaagtgacattgctaagcagtactctaatgctaatgtaatatgcttgccctcatatcgagaagggttac

SEQ ID NO: 890828 - DNA, 75 bp, synthetic construct
  source 1..75: mol_type = other DNA
gccgctgatgtgccgcaggtcaaagtgaccgtgacggataagcagtgcgaaccgatgaccattacggttaacgcc

SEQ ID NO: 890829 - DNA, 75 bp, synthetic construct
  source 1..75: mol_type = other DNA
gtttatgatattcatcatattatttacggtaagcgagtttatatctggtctgccgatacagaaggtctgatgtct

SEQ ID NO: 890830 - DNA, 75 bp, synthetic construct
  source 1..75: mol_type = other DNA
ctggtaaaacccacacggacgacgcagtatccaccatatccggcgctggttcgtcacggaacggggttgtcatct

SEQ ID NO: 890831 - DNA, 75 bp, synthetic construct
  source 1..75: mol_type = other DNA
aaaacgaggggtatctggctggccgcaatgcgcagctgcatcacgcggtaagcagttcagctaataaatgcgaac

SEQ ID NO: 890832 - DNA, 75 bp, synthetic construct
  source 1..75: mol_type = other DNA
gtaaagtcttgcgtcagttgttacgggaaggtatcagagtggcctggtgcactgtggcacgtctcatggcggtta

SEQ ID NO: 890833 - DNA, 75 bp, synthetic construct
  source 1..75: mol_type = other DNA
ccagacggtatatcagccggggagcttcgcgccgctcatccgcatcgaaacagacaacggtgagcgggagaaagc

SEQ ID NO: 890834 - DNA, 75 bp, synthetic construct
  source 1..75: mol_type = other DNA
cacaacgaccagcctttacagccggatatacggtgtggagtggccgtcaggaaataatgttcgccatgagcgtga

SEQ ID NO: 890835 - DNA, 75 bp, synthetic construct
  source 1..75: mol_type = other DNA
atgtgccacacgttgcgcgagaacttcaagaggcattccgcatcgcctgtgataacgctggcatcaacgtcaccg

SEQ ID NO: 890836 - DNA, 75 bp, synthetic construct
  source 1..75: mol_type = other DNA
cccgttagggccacagtcggcgaaaattttttgtgattttcacagaaatattatcaacagatgcgccgatgagat

SEQ ID NO: 890837 - DNA, 75 bp, synthetic construct
  source 1..75: mol_type = other DNA
tcctttgctcgcctgcagccagctgggtaagcggacaaattctcaccgtctccggtggtggggtacaggagctca

SEQ ID NO: 890838 - DNA, 75 bp, synthetic construct
  source 1..75: mol_type = other DNA
acaccgccacgttgcgtaaaaatatcaaacccgccaccaaggtggctcgtgccgatacgttctgctctgcctggg

SEQ ID NO: 890839 - DNA, 75 bp, synthetic construct
  source 1..75: mol_type = other DNA
taacggatgcccagcttttgcgtaatctgcccaatgtcagactgtacccgttgtacctggctgcgggactgggac

SEQ ID NO: 890840 - DNA, 75 bp, synthetic construct
  source 1..75: mol_type = other DNA
tttggacctacaccctgattaccgccctgacgccaggaccaaacaatatactcgctcttagctctgccacgtcgc

SEQ ID NO: 890841 - DNA, 75 bp, synthetic construct
  source 1..75: mol_type = other DNA
ggggtaaaaaggtccgcactaccgtcagtcggaaagtcgttgccgcaggagaccgcgtaaaccgtcagttcgtgg

SEQ ID NO: 890842 - DNA, 75 bp, synthetic construct
  source 1..75: mol_type = other DNA
actggagagaacggcggttttgttgcggcggaaaaatagctggcagacagccgccgcgaaggcatttttgaacat

SEQ ID NO: 890843 - DNA, 75 bp, synthetic construct
  source 1..75: mol_type = other DNA
taatgagttaggttttgatgtatggtttgatgaaaataacatattgcccgggcagattattgaaaagcaaattaa

SEQ ID NO: 890844 - DNA, 75 bp, synthetic construct
  source 1..75: mol_type = other DNA
gaatacgtggagttgagcgacggcactttatcgtggttagggaacgccttgtactggatgccgctgccagaaccg

SEQ ID NO: 890845 - DNA, 75 bp, synthetic construct
  source 1..75: mol_type = other DNA
cagatactcttcttcgcagggttatcaataccccggagacgagactgtcaggcgcgctccatgtcagtattaatg

SEQ ID NO: 890846 - DNA, 75 bp, synthetic construct
  source 1..75: mol_type = other DNA
agttaccttgcagatggcaatgcagtcgacaaataattagctctgacggtataaccctccatctccgcggaaaac

SEQ ID NO: 890847 - DNA, 75 bp, synthetic construct
  source 1..75: mol_type = other DNA
gaaagctggttgcgtgaaaagatgaagaccctgttcttcggctctggccatggtggtgagcggggagcgctactg

SEQ ID NO: 890848 - DNA, 75 bp, synthetic construct
  source 1..75: mol_type = other DNA
tcaacaaacaaaaaacctgtggattctcgctgtatacacgggtattcgtcacggggagttggtatcgctggcatg

SEQ ID NO: 890849 - DNA, 75 bp, synthetic construct
  source 1..75: mol_type = other DNA
ggcaccctataatgatatcgtcaacgaacttattcaggatgttgattatatcacccccaatgaaacagaagctgg

SEQ ID NO: 890850 - DNA, 75 bp, synthetic construct
  source 1..75: mol_type = other DNA
atgttccactgacagctatccgcagtgcatctcttgaagaaaatgactgggaatgtcttgggggcgccatgtcac

SEQ ID NO: 890851 - DNA, 75 bp, synthetic construct
  source 1..75: mol_type = other DNA
tactatcggatttcttgggaacagaacaaaccaagtttacaaaacctaaaaaaattgaggttcgagtagatggtg

SEQ ID NO: 890852 - DNA, 75 bp, synthetic construct
  source 1..75: mol_type = other DNA
aggcgggcgactctccggtaactccggatggttggataagctgtagtgagcgaatgccggataagttaattccgg

SEQ ID NO: 890853 - DNA, 75 bp, synthetic construct
  source 1..75: mol_type = other DNA
catagctggaatgtttcaatttgcaacagataatggttatacatcaggaaatccatttaacggtctgacaccatt

SEQ ID NO: 890854 - DNA, 75 bp, synthetic construct
  source 1..75: mol_type = other DNA
cgtttatgactaacgagaatctggcgctgtatcaggatgcttacgaaatcggcgcagaaaagatcatcgacacct

SEQ ID NO: 890855 - DNA, 75 bp, synthetic construct
  source 1..75: mol_type = other DNA
atcgggctggggcagatgaatttacacggttatctggcgcgagaaggcatcgcttatggttcgccggaagcactg

SEQ ID NO: 890856 - DNA, 75 bp, synthetic construct
  source 1..75: mol_type = other DNA
atccgatgatgcatattgtgctttaatttggaggattaataacttcaaggctgaatcattcaaacgagttggtaa

SEQ ID NO: 890857 - DNA, 75 bp, synthetic construct
  source 1..75: mol_type = other DNA
aatcttgccaggttcatgcgtaacaatcccggcgctgagggttttctgaaccggctgggggttcaaacgcgtgat

SEQ ID NO: 890858 - DNA, 75 bp, synthetic construct
  source 1..75: mol_type = other DNA
catatcaattcattcctgaagctatcgtagccgcaggtactcgtgcttcacctaataccctttatagatctgatt

SEQ ID NO: 890859 - DNA, 75 bp, synthetic construct
  source 1..75: mol_type = other DNA
ttaccggcaaggggctgatggttccctgtaatgtactggaagtagttgtccagacaagcgaaggcgcatggcagt

SEQ ID NO: 890860 - DNA, 75 bp, synthetic construct
  source 1..75: mol_type = other DNA
tcgccaaagtggctgacggcgaagaaatcaccatgagcggcctgccttacctggtatcagcgttcaaccacaaca

SEQ ID NO: 890861 - DNA, 75 bp, synthetic construct
  source 1..75: mol_type = other DNA
ctgttctggctgaacgttcactggtggcacaggcaggcgctgaaatcatccgcatccctggcccgatgaccacgc

SEQ ID NO: 890862 - DNA, 75 bp, synthetic construct
  source 1..75: mol_type = other DNA
atgaacgttttatctcaacttatcaacgacgcgttgaaccaccagggcggccacattcgcactgatggcaacggt

SEQ ID NO: 890863 - DNA, 75 bp, synthetic construct
  source 1..75: mol_type = other DNA
ttgggaagacaatattttacccctattgatgaatttaaaaataaatatatgggacaggcaataatcacgtcaccg

SEQ ID NO: 890864 - DNA, 75 bp, synthetic construct
  source 1..75: mol_type = other DNA
agcctgaaatgatggctgactgtgatttgttccggttgaccgctatcaacgcagttcgtaagatgaacgacgcaa

SEQ ID NO: 890865 - DNA, 75 bp, synthetic construct
  source 1..75: mol_type = other DNA
aacgtatcgcgcgggcgggtcaatggtttggcgaaacgttaattgccgatgatgccttgcgggcatcgttaaatg

SEQ ID NO: 890866 - DNA, 75 bp, synthetic construct
  source 1..75: mol_type = other DNA
gcgatatctatcgatgctcctgcagaagaacggcggagatctgggtaaagctctggcctcgtataactgggggat

SEQ ID NO: 890867 - DNA, 75 bp, synthetic construct
  source 1..75: mol_type = other DNA
ctctcctttttatatcccggggagacacccatgaaattcttatagaaacaaaccagcggacaaggcctgacgtac

SEQ ID NO: 890868 - DNA, 75 bp, synthetic construct
  source 1..75: mol_type = other DNA
atcgctggcccagcagggattgcttcctgggttattggcggttttgcggtgctgctactggggattatttactgc

SEQ ID NO: 890869 - DNA, 75 bp, synthetic construct
  source 1..75: mol_type = other DNA
cgcaaaccgtcgttgttgagtcggggaagtttaaaaagcagttaacgctcaccgacttgacctttattggtctgg

SEQ ID NO: 890870 - DNA, 75 bp, synthetic construct
  source 1..75: mol_type = other DNA
atattttttacttgtaagcggaaatcggtgggttaaaaactcttatcgagcaatccaggctctagatgaattaat

SEQ ID NO: 890871 - DNA, 75 bp, synthetic construct
  source 1..75: mol_type = other DNA
ctgcgtgacaagttgtcaccgtatgacaccgaagagatgcttgaggctatgcgtatttttctggaagaacaggga

SEQ ID NO: 890872 - DNA, 75 bp, synthetic construct
  source 1..75: mol_type = other DNA
gtagtttcgttgtcggagttacaggaggctggtcaggatgagaaaaacagaggcccgaaagaacgaattattcat

SEQ ID NO: 890873 - DNA, 75 bp, synthetic construct
  source 1..75: mol_type = other DNA
cgggcgggcgatttgccagatttgaaactgcttttgatggattacgggctcttgctcgtcagttaatgttgtacg

SEQ ID NO: 890874 - DNA, 75 bp, synthetic construct
  source 1..75: mol_type = other DNA
tcggggatattatcgggcggttgttcttcagactgattgaggggacatcaggccttatcacctggtggcaatcgc

SEQ ID NO: 890875 - DNA, 75 bp, synthetic construct
  source 1..75: mol_type = other DNA
ggctggatgggtgtatcgccgacggcagcattaaacctgtccgaccccaatacgatggctatgctcatgcagtct

SEQ ID NO: 890876 - DNA, 75 bp, synthetic construct
  source 1..75: mol_type = other DNA
cgcgtctatctggcgtttatggcatacgcgggcaggagcaaaccgctaaacgtggctgagttcagcaaggccatg

SEQ ID NO: 890877 - DNA, 75 bp, synthetic construct
  source 1..75: mol_type = other DNA
accaaaagcggtcaaggctgcatacgacctcgcagccggcaaggcgccagacagccacactcacccgtggagtca

SEQ ID NO: 890878 - DNA, 75 bp, synthetic construct
  source 1..75: mol_type = other DNA
agaaagtgaaatcgttcacgtatggcgcggcggggtatggtgtccggtcagcacaatggaacttagccgcgaaat

SEQ ID NO: 890879 - DNA, 75 bp, synthetic construct
  source 1..75: mol_type = other DNA
tagtacaaagtctacaatattttatcactaaaaaaattgataaagaactaagtaaagatgaggataacaaagatg

SEQ ID NO: 890880 - DNA, 75 bp, synthetic construct
  source 1..75: mol_type = other DNA
attatattaccaagccatctgcctttaacaaattctcatcctctgctatagatgatgcattcgatttagccaaag

SEQ ID NO: 890881 - DNA, 75 bp, synthetic construct
  source 1..75: mol_type = other DNA
caccaataaacgaaaaaaatgcaaaaacaatgatagaggatacgttcgagttagctaactctgatagtgagaact

SEQ ID NO: 890882 - DNA, 75 bp, synthetic construct
  source 1..75: mol_type = other DNA
accggagtgctcgaaattaaaatttctgacagggtatacagtcaggcagaacatcagggcaaaagaaaattactg

SEQ ID NO: 890883 - DNA, 75 bp, synthetic construct
  source 1..75: mol_type = other DNA
aacgctgccgaagccggagctgcgctgaccatcaccggcagcagcactgcggaagcggggcagacggtgaccgtc

SEQ ID NO: 890884 - DNA, 75 bp, synthetic construct
  source 1..75: mol_type = other DNA
agagcatcagcgggcaagtgacgggcgcggcagcgggcgacacggtaaccgtcacgctcggcggggcgacttaca

SEQ ID NO: 890885 - DNA, 75 bp, synthetic construct
  source 1..75: mol_type = other DNA
cgccaccagtgcggcaggtaacaccgccagcagccaggcgaatttactggtcgacagcggcctgccgggcgtcac

SEQ ID NO: 890886 - DNA, 75 bp, synthetic construct
  source 1..75: mol_type = other DNA
tccgttgttcgatcaggcggtgcagtttgtcactgaaaaacgcaaagcgtcaatttctggcgtacagcgtcagtt

SEQ ID NO: 890887 - DNA, 75 bp, synthetic construct
  source 1..75: mol_type = other DNA
gtacagccacagcagccgtattatgcgcctgcggcggaacaacctgttcagcaaccgtattacgcaactgcgccg

SEQ ID NO: 890888 - DNA, 75 bp, synthetic construct
  source 1..75: mol_type = other DNA
tggtgtcgttcgcgccgcgcagcgtttcgtcgcacaggagatgcctgggcatgcggctacggctgggaaaatgcg

SEQ ID NO: 890889 - DNA, 75 bp, synthetic construct
  source 1..75: mol_type = other DNA
tatgcggcaggtgcttgaaatctcagatagcgtgacattacaaagtaatatttatgatcgcactgaagggagagg

SEQ ID NO: 890890 - DNA, 75 bp, synthetic construct
  source 1..75: mol_type = other DNA
accaaaagcggtcaaggctgcatacgacctcgcagccggcaaggcgccgggcagccacactcacccgtggagtca

SEQ ID NO: 890891 - DNA, 75 bp, synthetic construct
  source 1..75: mol_type = other DNA
gcaacggtgaactgaccatttcggcttcggtaacaaacagcgtaggcaataccggcaacggcacgcgcgaaatca

SEQ ID NO: 890892 - DNA, 75 bp, synthetic construct
  source 1..75: mol_type = other DNA
cgctgaatgtgtccaatctggcgataccgacagactggccgatgccgcagggcgtgacggaaaaagcgacgccgt

SEQ ID NO: 890893 - DNA, 75 bp, synthetic construct
  source 1..75: mol_type = other DNA
accaaaagcggtcaaggctgcatacgacctcgcagccggcaaggcgcccgccagccacactcacccgtggagtca

SEQ ID NO: 890894 - DNA, 75 bp, synthetic construct
  source 1..75: mol_type = other DNA
gaaacgaaaatggtgttcctggctttgggatgggattggcaattgttaatggcttggttaaagcaatgaaaggcc

SEQ ID NO: 890895 - DNA, 75 bp, synthetic construct
  source 1..75: mol_type = other DNA
tttgctcaggcttacgagttaaacaataaggaaaggaatgcgcaaattggttttttaactcgttatgcaatttaa

SEQ ID NO: 890896 - DNA, 75 bp, synthetic construct
  source 1..75: mol_type = other DNA
gcagacagcggaggatatgcggaatccggtggtctccggctggacggtggagattcaggacgctcagggtgactg

SEQ ID NO: 890897 - DNA, 75 bp, synthetic construct
  source 1..75: mol_type = other DNA
tggggaacagagcaagccgccgacgccgggctgcgcgattactccaaccgccagtggcagggactcaccggtgat

SEQ ID NO: 890898 - DNA, 75 bp, synthetic construct
  source 1..75: mol_type = other DNA
ggtcactttccgccatttgctgcgcttctcgcaaaaagggcaattcgttctgcctcctgctcgttatgtgcgttc

SEQ ID NO: 890899 - DNA, 75 bp, synthetic construct
  source 1..75: mol_type = other DNA
tgtcgtttaccctggctcattattacgtgtgcagtaagccccggatatcaggtgtcagcgccagtgatataagac

SEQ ID NO: 890900 - DNA, 75 bp, synthetic construct
  source 1..75: mol_type = other DNA
atgactgtatttctcatggccgttttctatggcctcttaaaaactggctctctcattgccctacttgttgatgcc

SEQ ID NO: 890901 - DNA, 75 bp, synthetic construct
  source 1..75: mol_type = other DNA
ggtgtaggcctgataagacgcgccagcgtcgcatcaggcaaccggctcgggcgttggatgtcggatgcggcgtga

SEQ ID NO: 890902 - DNA, 75 bp, synthetic construct
  source 1..75: mol_type = other DNA
caaccggcttgggcgttagatgtcggatgcggcgtaaccgccttatccgacctacggggtggagcacttcacagc

SEQ ID NO: 890903 - DNA, 75 bp, synthetic construct
  source 1..75: mol_type = other DNA
gttgccagcagcacccccgtcaccagtcaggagtcacagcagtaccgtcagttgttatcacaggcgaaccggatg

SEQ ID NO: 890904 - DNA, 75 bp, synthetic construct
  source 1..75: mol_type = other DNA
ctggcgttatttcacatcgagctggatgtctggcgtcaatatgtttatcgatcatgacctgacccgctatcacac

SEQ ID NO: 890905 - DNA, 75 bp, synthetic construct
  source 1..75: mol_type = other DNA
tccgtttcctgaataatccggaacgtttcgatgctgatggcaccttaaccttgcgcgttatgtcgcttggcgaac

SEQ ID NO: 890906 - DNA, 75 bp, synthetic construct
  source 1..75: mol_type = other DNA
cttcatcccgcctgatgctgaccatcgggctttgttttttggtcgctctgatggaagggttggatcttcaggcgg

SEQ ID NO: 890907 - DNA, 75 bp, synthetic construct
  source 1..75: mol_type = other DNA
aacatgctgcgggtgagggtgacggatgtgttcgggaatgtacttgccggccagacggttagcgtgacggcggac

SEQ ID NO: 890908 - DNA, 75 bp, synthetic construct
  source 1..75: mol_type = other DNA
ttgccgggcagacggtcagcgtgacggcaggcaacggcgcaacggttgctccggtggtcaccacgcagccggacg

SEQ ID NO: 890909 - DNA, 75 bp, synthetic construct
  source 1..75: mol_type = other DNA
agccggacggcacggtggagatcagtgtcaccagccagacggcgggagtcagtactgtcactgccagcattaaca

SEQ ID NO: 890910 - DNA, 75 bp, synthetic construct
  source 1..75: mol_type = other DNA
cagtcttatcaaggccgagatcaatggcagtagtcagtctgtggaagtgagctttattactggcgatatctcgca

SEQ ID NO: 890911 - DNA, 75 bp, synthetic construct
  source 1..75: mol_type = other DNA
ccggcagcagcgtgacggtggaaggcgcggacggcccgtccggcagctggacgggaacggacggaacatacaccg

SEQ ID NO: 890912 - DNA, 75 bp, synthetic construct
  source 1..75: mol_type = other DNA
atcatgacttgacgcgttatcacacccgtaccgggatgggtatcgagtactggcgtgattatctgaaactgggcg

SEQ ID NO: 890913 - DNA, 75 bp, synthetic construct
  source 1..75: mol_type = other DNA
cagcgtgacggcagacaacagcgcaacggtcactccgacggtcaccacacagccggacggcacggcggagatctt

SEQ ID NO: 890914 - DNA, 75 bp, synthetic construct
  source 1..75: mol_type = other DNA
aatgattatgaagcacgcccggcgaacggttgggatcttcgcgccgaaggctggttaccggcctggccgcagttg

SEQ ID NO: 890915 - DNA, 75 bp, synthetic construct
  source 1..75: mol_type = other DNA
cgaacgctctgacttcaaatgattacagtattagtggcgatgccgccagcgcacaaattgtcgcgatgcaagtga

SEQ ID NO: 890916 - DNA, 75 bp, synthetic construct
  source 1..75: mol_type = other DNA
tctggtggtcattaaggatggttcagaggcagacggttcgacggcgaacacgctgcaggtgaaggtgaccgatgc

SEQ ID NO: 890917 - DNA, 75 bp, synthetic construct
  source 1..75: mol_type = other DNA
aacagtgcctcggcgacccatgcgtatagcgttgacgccagcgcgccgacgctcaccattaacaccatcgccagc

SEQ ID NO: 890918 - DNA, 75 bp, synthetic construct
  source 1..75: mol_type = other DNA
ctggggcggtttacaggccaccgatgccactcacgcttacgatctcagcgccgaagcgggtaccgcgagcaacaa

SEQ ID NO: 890919 - DNA, 75 bp, synthetic construct
  source 1..75: mol_type = other DNA
tacacggagctggggtgtcaaaatggataatacggcactcagtcaggacggagctacaaatattgctgaagtcaa

SEQ ID NO: 890920 - DNA, 75 bp, synthetic construct
  source 1..75: mol_type = other DNA
tgcggcggcgggcgatacggttaccgtaacgcttggcgggaaaacctacaccgctaccgtgcagggcaatttaag

SEQ ID NO: 890921 - DNA, 75 bp, synthetic construct
  source 1..75: mol_type = other DNA
atgtctttattgaaaaacatcaggctgagttcagcatcaaagcaatcgtgccgcgtgctccgggtggcccgcagc

SEQ ID NO: 890922 - DNA, 75 bp, synthetic construct
  source 1..75: mol_type = other DNA
tctgctggagcaggatttttacgccagtggcccgaaccagaagtgggcaggagacatcacgtacttacgtacaga

SEQ ID NO: 890923 - DNA, 75 bp, synthetic construct
  source 1..75: mol_type = other DNA
aaccccggatctcacacgctgaagtgcaggcagtggtttcatccgcctccagcccgctggatatgacgtttcata

SEQ ID NO: 890924 - DNA, 75 bp, synthetic construct
  source 1..75: mol_type = other DNA
aacagcgagcctttagttatcaggaagatggcactaaaaaaagtgtgttattacggcagattatcgccattagcg

SEQ ID NO: 890925 - DNA, 75 bp, synthetic construct
  source 1..75: mol_type = other DNA
agccggacggcacggtggagatcagtatcaccagccagacggcgggagtcagtgcagtcactgcaaccatcaaca

SEQ ID NO: 890926 - DNA, 75 bp, synthetic construct
  source 1..75: mol_type = other DNA
cacagccacaccccacgccggataaacctgtacagaaggtctatcgtccggaagcgggctcttatattgcgaaca

SEQ ID NO: 890927 - DNA, 75 bp, synthetic construct
  source 1..75: mol_type = other DNA
gaggaatatactcaactggcgatattgttacaccaaagcgattctccgatataagtcctgtcgaaatgtcatctc

SEQ ID NO: 890928 - DNA, 75 bp, synthetic construct
  source 1..75: mol_type = other DNA
atcattaagtattcctattatttatcttgcaagtaattcaggggccattttagtcactaaaaataatatgcaagc

SEQ ID NO: 890929 - DNA, 75 bp, synthetic construct
  source 1..75: mol_type = other DNA
gcctctgtcagctctggttcccaggctagtcaacaggtgaattttatcggtgatcaaagtactgctgccctgacc

SEQ ID NO: 890930 - DNA, 75 bp, synthetic construct
  source 1..75: mol_type = other DNA
gacagaacagcttaacccggcaggcttaagctacacgtatcagtatgagaaagacccatcaccatcaccgacagc

SEQ ID NO: 890931 - DNA, 75 bp, synthetic construct
  source 1..75: mol_type = other DNA
aggctgcactcgaaaaccgtgctgtgcatgcagaagttttgaactattgtcgtgcagaacttctggacgaaaact

SEQ ID NO: 890932 - DNA, 75 bp, synthetic construct
  source 1..75: mol_type = other DNA
tcggctttggcgtcaaactgactaacaccctcggcaccatcaacaacaaaggcgcactgccaggtgaagagatgt

SEQ ID NO: 890933 - DNA, 75 bp, synthetic construct
  source 1..75: mol_type = other DNA
gtccggctggtctggctgccggttatttccttgccagagccggtcatccggtcacactgtttgaacgcgaagcca

SEQ ID NO: 890934 - DNA, 75 bp, synthetic construct
  source 1..75: mol_type = other DNA
ggacggtgccgggcgggagttccgtctggtgctgaccacgcaggcgcagcgtgcggaagaggcccgcacctcttc

SEQ ID NO: 890935 - DNA, 75 bp, synthetic construct
  source 1..75: mol_type = other DNA
aagatgcagggcgtagccaaccccagagaacatagaccagcaaaataccgcgaccccaggaacgcagaaaatacc

SEQ ID NO: 890936 - DNA, 75 bp, synthetic construct
  source 1..75: mol_type = other DNA
tgggttgggagaggaaagcgccctgactggctaaaaaaatatcttgatgaaggccgcgagctttcggagtttgag

SEQ ID NO: 890937 - DNA, 75 bp, synthetic construct
  source 1..75: mol_type = other DNA
tagccaacttgcaacttaaaatattatttatgcagccaattaaattctggtccttacaatatcaacctgaagatt

SEQ ID NO: 890938 - DNA, 75 bp, synthetic construct
  source 1..75: mol_type = other DNA
ctcagcaccttgaggccgcttgtcgcgttcttgctgataccgaacgtggcttgagtggggcgcagatcgagcgac

SEQ ID NO: 890939 - DNA, 75 bp, synthetic construct
  source 1..75: mol_type = other DNA
cattttgaccggcgggatcgatctttccgtgggttcgatcctcggcaccacagcggtggcggcgatggtcgtctc

SEQ ID NO: 890940 - DNA, 75 bp, synthetic construct
  source 1..75: mol_type = other DNA
gaagctgctaagtattatcgaaaatatcaactgatttcctttgctgttttaattatagggtacggcttttattat

SEQ ID NO: 890941 - DNA, 75 bp, synthetic construct
  source 1..75: mol_type = other DNA
acggctggccagacgtcgaccataatggcgaaactcgtctgactgacgtctttatgatcggcgacgtacagcgcg

SEQ ID NO: 890942 - DNA, 75 bp, synthetic construct
  source 1..75: mol_type = other DNA
acctgattgtgatgtgggcggcgatcgaagccaccaccttaagctcggcgtttctggtaggcatttacggtcagc

SEQ ID NO: 890943 - DNA, 75 bp, synthetic construct
  source 1..75: mol_type = other DNA
tagatatagacaagtgtgatcatataataaatgagcttaaaaaatctgaagtgcaagcattaattgtaggaatgg

SEQ ID NO: 890944 - DNA, 75 bp, synthetic construct
  source 1..75: mol_type = other DNA
ttgtttttttgtatgtggtgctgattttttgtgcgctgtcgggcctcagacgtgcggaagcctccggcgcgtgcc

SEQ ID NO: 890945 - DNA, 75 bp, synthetic construct
  source 1..75: mol_type = other DNA
aaggaacaaaaacagcaactgaataccgcagtcagcatcgacaacgtgaaaccaggagtcactactgactggaaa

SEQ ID NO: 890946 - DNA, 75 bp, synthetic construct
  source 1..75: mol_type = other DNA
acacctggccaattgaagtcaccgctgaagatgtcaaaggcaatttttcgaatcgtgaacagagcatggtagtcg

SEQ ID NO: 890947 - DNA, 75 bp, synthetic construct
  source 1..75: mol_type = other DNA
ggccgctgcccctacgcatattaatcatgcgcattcggatactgccacgtccctgatcctgccgaacgttaaaac

SEQ ID NO: 890948 - DNA, 75 bp, synthetic construct
  source 1..75: mol_type = other DNA
ttgtctgaacaggtgcctcagaccgaaaaagtgacgttattgttacgccagcacatcggtgccagcgcaattgcg

SEQ ID NO: 890949 - DNA, 75 bp, synthetic construct
  source 1..75: mol_type = other DNA
acgaccagaccatccgcgagcgagtacaggcagcaggtgtcgtgggtgctggcggcgcaggtttcccaacccata

SEQ ID NO: 890950 - DNA, 75 bp, synthetic construct
  source 1..75: mol_type = other DNA
ccggggccggatggtggcgcaccgtcacacgggccggccggaaatccgttaccgttacgacagcgacggcgggtg

SEQ ID NO: 890951 - DNA, 75 bp, synthetic construct
  source 1..75: mol_type = other DNA
atgcacctgaaggtggatgatgaggttgtttttttgtatgtggtgctgattttttgtgcgctgacggacttcagg

SEQ ID NO: 890952 - DNA, 75 bp, synthetic construct
  source 1..75: mol_type = other DNA
gaaaatattcgctcccaccagaacgataaacactggaacaacgtcaacccggcggaaatctaccaacgtaaaggt

SEQ ID NO: 890953 - DNA, 75 bp, synthetic construct
  source 1..75: mol_type = other DNA
ctttatggcagtgagtttcggataagagatattaatgagaattttgttgggatggattttacctgtgaattctga

SEQ ID NO: 890954 - DNA, 75 bp, synthetic construct
  source 1..75: mol_type = other DNA
tttcgtctcaatgaccgcgattattctagcggtgatattctcgggttgcatgaatgggaaccggtaaacagatat

SEQ ID NO: 890955 - DNA, 75 bp, synthetic construct
  source 1..75: mol_type = other DNA
gcggcctctctccacttcagcgcgcacgcgctatcatcgataactgcgcccatcccatgtaccgtgactatctgc

SEQ ID NO: 890956 - DNA, 75 bp, synthetic construct
  source 1..75: mol_type = other DNA
gcggagtaggtaacatcaataacgcagtaatggcgaggttgggcgaaaacccgaatattccttcatttatgatgt

SEQ ID NO: 890957 - DNA, 75 bp, synthetic construct
  source 1..75: mol_type = other DNA
atgcaactttacctgtgcgaaaaaccctctcaggcgcgcgatatcgcccgcgttcttgacgcccgcaacctcagc

SEQ ID NO: 890958 - DNA, 75 bp, synthetic construct
  source 1..75: mol_type = other DNA
gggagcgagaagtattcttttaatggctgggaaatatttaatagtaattttgaacggatgattaaagaaaataag

SEQ ID NO: 890959 - DNA, 75 bp, synthetic construct
  source 1..75: mol_type = other DNA
gtggcgtgggcaatatcaataatgcggtaatggcgcgtctgggggaaaacccggaaattcctccgtttatgatgt

SEQ ID NO: 890960 - DNA, 75 bp, synthetic construct
  source 1..75: mol_type = other DNA
cgtgcctactcgtggtgcagttgtgcgttcccgctttgatacccgcgtcggttaccgtgtgctgatgagcttaaa

SEQ ID NO: 890961 - DNA, 75 bp, synthetic construct
  source 1..75: mol_type = other DNA
gatctgcttaccgcagacaaacgccgccgcgagcatctgttacagacgctgcgcagccgcttgcaggatatacgc

SEQ ID NO: 890962 - DNA, 75 bp, synthetic construct
  source 1..75: mol_type = other DNA
gcggcctctccccacttcagcgcgcacgcgctatcatcgataactgtgcccatcccatgtaccgtgactatctgc

SEQ ID NO: 890963 - DNA, 75 bp, synthetic construct
  source 1..75: mol_type = other DNA
gcgaagaaaccgtatcaaattcgcttgctgaccggggcatcgattagcgccgccgctgacgatgttctctctgaa

SEQ ID NO: 890964 - DNA, 75 bp, synthetic construct
  source 1..75: mol_type = other DNA
caatgtgcagccatgttgatcacagcgaacacagcgtcaaagtgatcatcaccgaacaagggatcgccgatctgc

SEQ ID NO: 890965 - DNA, 75 bp, synthetic construct
  source 1..75: mol_type = other DNA
attaatcatgaaattatgcatcagctcggtcttgctgttatgtatgagtcagtgacagggctgtctggcggggca

SEQ ID NO: 890966 - DNA, 75 bp, synthetic construct
  source 1..75: mol_type = other DNA
atggcaactattaataattttgatgtcgaagagttatttgttaaacaaaatcgtcactccaaagtgatcaatgtc

SEQ ID NO: 890967 - DNA, 75 bp, synthetic construct
  source 1..75: mol_type = other DNA
atgtcagtagcacgttttcctgatttaaccgtgtcacatatgcaaaaatccaaattttcatatattgagaatgaa

SEQ ID NO: 890968 - DNA, 75 bp, synthetic construct
  source 1..75: mol_type = other DNA
taacgcagaggctactcaatggcttactggtgcagcgcagcgtggtcgaatagaggcgatatttttgttagccga

SEQ ID NO: 890969 - DNA, 75 bp, synthetic construct
  source 1..75: mol_type = other DNA
aaaacatttccaagctgcgctgaatgcatttcaaaagcatggtgaattccttgagttgaaaataatattcaaaaa

SEQ ID NO: 890970 - DNA, 75 bp, synthetic construct
  source 1..75: mol_type = other DNA
accttttaataatgtcgattatagtggttttcatgaggttttcatacaaatacttgaaatagcctctacgtataa

SEQ ID NO: 890971 - DNA, 75 bp, synthetic construct
  source 1..75: mol_type = other DNA
atggatacatttttcccttttaatacctcgccaaaatataagatagaaaacaataaagaattagctgcactattg

SEQ ID NO: 890972 - DNA, 75 bp, synthetic construct
  source 1..75: mol_type = other DNA
ccgcactggctgccggtgaagcaggaaataccggtgagaatacccttttaacgttgatcaccccggttgcctgtg

SEQ ID NO: 890973 - DNA, 75 bp, synthetic construct
  source 1..75: mol_type = other DNA
ggatcatcgttgcgcgatccttatgctcctcgacaaggctggaaaccaactatgggatgtacccgtgcacagaat

SEQ ID NO: 890974 - DNA, 75 bp, synthetic construct
  source 1..75: mol_type = other DNA
gtgctggtgatccatatacaggtgaagtcgttggttgtgagacaaatgaatcaggaatatcggcagcatatggca

SEQ ID NO: 890975 - DNA, 75 bp, synthetic construct
  source 1..75: mol_type = other DNA
tggccgaatgttttgaccgtaagggcgtagcgaccgcgttgcgtgcccgtcacacgtttgccactaccggtgaac

SEQ ID NO: 890976 - DNA, 75 bp, synthetic construct
  source 1..75: mol_type = other DNA
tggcgcatcttgccggcgggcaggtgtacccgtatgtggtccccctgctggatggcaggccgtcggtggcgcttc

SEQ ID NO: 890977 - DNA, 75 bp, synthetic construct
  source 1..75: mol_type = other DNA
ctacttcaaatcccatggctggaccaaaggtgcgatggtcgcggtgcccgctaatgggcaagcgccataccttga

SEQ ID NO: 890978 - DNA, 75 bp, synthetic construct
  source 1..75: mol_type = other DNA
acactgctgcgcgaggggtttccgtccgacattatttatgccccggagggcgcacgcggcgcagaacaacgcctg

SEQ ID NO: 890979 - DNA, 75 bp, synthetic construct
  source 1..75: mol_type = other DNA
cgatgccacggccccgacgcttgccattaacaccatcgccaccgacgatattctgaacgctgccgaggcgggcaa

SEQ ID NO: 890980 - DNA, 75 bp, synthetic construct
  source 1..75: mol_type = other DNA
caactacacggtaacggcggcggtaaccagcagtatcggcaacagcgccaccgccagccataacgtgctggtcga

SEQ ID NO: 890981 - DNA, 75 bp, synthetic construct
  source 1..75: mol_type = other DNA
attaacagcattgcgggcgatgatgtgattaacgccagcgaaaaaggggccgatctccagattaccggcaccagc

SEQ ID NO: 890982 - DNA, 75 bp, synthetic construct
  source 1..75: mol_type = other DNA
tgattaacgccagcgaaaaaggaaccgatgtccagattaccggcaccagcgatcagcctgttaataccgccatca

SEQ ID NO: 890983 - DNA, 75 bp, synthetic construct
  source 1..75: mol_type = other DNA
tcaccgttacgttaaataattccgattacaccacggtggtggatggttccggcaactggagtctgggtgttccgg

SEQ ID NO: 890984 - DNA, 75 bp, synthetic construct
  source 1..75: mol_type = other DNA
agctggactgccaccgtacccgccgccgatctggcagcattaccagagggcagcgcctccgcgcaggccagcgtc

SEQ ID NO: 890985 - DNA, 75 bp, synthetic construct
  source 1..75: mol_type = other DNA
gcgtcaccattaacgtggtggcaacggacgatataattaacgccgccgaagcgggcgtggaccagaccatcagcg

SEQ ID NO: 890986 - DNA, 75 bp, synthetic construct
  source 1..75: mol_type = other DNA
tcagtgcggcggtcagcgacaaagccggaaatccggcttcggcaacgcataatctgacggtggaccttgccgctc

SEQ ID NO: 890987 - DNA, 75 bp, synthetic construct
  source 1..75: mol_type = other DNA
attggcggcaatcaatataacgccaccgtgcagtcagatttaagctggagcgtcagcgtaccggcgaacgttttg

SEQ ID NO: 890988 - DNA, 75 bp, synthetic construct
  source 1..75: mol_type = other DNA
tgacggcgcggtggcgattaccgcttctgtgacggatctcagcggcaataccggcaacacttcccgcaccattac

SEQ ID NO: 890989 - DNA, 75 bp, synthetic construct
  source 1..75: mol_type = other DNA
actggagtgtctcgttacccacgcaaagtgcaggtgaacatacctggtcagtggtgcaaattgtcggcagtacca

SEQ ID NO: 890990 - DNA, 75 bp, synthetic construct
  source 1..75: mol_type = other DNA
aagactcaatcgtaagacgctgggatattcaaagttagcagaaatgcatgacaggatcattggcactttcattga

SEQ ID NO: 890991 - DNA, 75 bp, synthetic construct
  source 1..75: mol_type = other DNA
aagactggattgatgttggcaatcgtgagtgtgtggtgcaacgacttcttcctccagggtctcccgtcggcgcct

SEQ ID NO: 890992 - DNA, 75 bp, synthetic construct
  source 1..75: mol_type = other DNA
atttcgcagaagaccgcgcacacgcagaagcggtatcgaccaaagagctaaaactggaccacgtagaaaaatttg

SEQ ID NO: 890993 - DNA, 75 bp, synthetic construct
  source 1..75: mol_type = other DNA
tttaaacgcaatgaatgaatccttatccagggataaggctgcgctttccggggcgatggagagccggaaacaaaa

SEQ ID NO: 890994 - DNA, 75 bp, synthetic construct
  source 1..75: mol_type = other DNA
ccggtagtgtcgacgaagaaaaatccaaaagcgataaaatcgattttacattttccggtgccgcaacaactgctg

SEQ ID NO: 890995 - DNA, 75 bp, synthetic construct
  source 1..75: mol_type = other DNA
cggcccggcgggcagtggcaaaacgacactgctgcgcgaggggtttccgtccgacattatttatgccccggaggg

SEQ ID NO: 890996 - DNA, 75 bp, synthetic construct
  source 1..75: mol_type = other DNA
atttcgcagaagaccgtgaacacgcagaagcggtagcgaccaaagagttagaacttggccatgtagaaaaattcg

SEQ ID NO: 890997 - DNA, 75 bp, synthetic construct
  source 1..75: mol_type = other DNA
gttcagcctggtggattcgatgagttagtgcgtacctatgaggccggaggcgatggaatagatccgctcaattgc

SEQ ID NO: 890998 - DNA, 75 bp, synthetic construct
  source 1..75: mol_type = other DNA
ctagtaaccaatccgggagataaagtctggttgctacaagcatggatgcaagatgaaaaaaataataaatatcct

SEQ ID NO: 890999 - DNA, 75 bp, synthetic construct
  source 1..75: mol_type = other DNA
aataaaagggatggccagcacctggcttgaattgttagacatgcataaaaaagaggccacaggaaataaggagtc

SEQ ID NO: 891000 - DNA, 75 bp, synthetic construct
  source 1..75: mol_type = other DNA
tggtttgccctgcatctgttggaagcgatgttccagccatcaggatccggtaagtcatttatctttaatatgagc

SEQ ID NO: 891001 - DNA, 75 bp, synthetic construct
  source 1..75: mol_type = other DNA
ataacctgtcagaaattaaagatgccggtgaggatgcgataaatgaagcccgttataacctcggaatatctgatt

SEQ ID NO: 891002 - DNA, 75 bp, synthetic construct
  source 1..75: mol_type = other DNA
tcggcagaaagtgccgcatcgtctgcttcaacagccacaacgaatgctggcgaagccgctgtacaggccagcgca

SEQ ID NO: 891003 - DNA, 75 bp, synthetic construct
  source 1..75: mol_type = other DNA
tcgtaacctatagtcaaaatgaaaaaattaaagagatggctactgcttatcttgaacttttgacagacaataccg

SEQ ID NO: 891004 - DNA, 75 bp, synthetic construct
  source 1..75: mol_type = other DNA
gtgctggcttgtctggtgcaatgggaagcgttgcgcggcaaagctatctaccgcgtactgctgattctgccctac

SEQ ID NO: 891005 - DNA, 75 bp, synthetic construct
  source 1..75: mol_type = other DNA
caaaacctataattttggtctttacccggcgggcgatgagtggcaactggcgctcagcgacggcgaaaccggcaa

SEQ ID NO: 891006 - DNA, 75 bp, synthetic construct
  source 1..75: mol_type = other DNA
aggcgagcgcgcgaatctgcgcgtgattacccagaatcgtcaggcactgagtgacattaccgccattctgccgga

SEQ ID NO: 891007 - DNA, 75 bp, synthetic construct
  source 1..75: mol_type = other DNA
tatgggacttgccggtgttctccggggtaaaaaggtccgtacgaccatcagccggaaaagccgttgccgcaggcg

SEQ ID NO: 891008 - DNA, 75 bp, synthetic construct
  source 1..75: mol_type = other DNA
tatgggacttgccggtgttctccggggtaaaaaggtccgtactaccgtcagccggaaagccgtttccgcaggcga

SEQ ID NO: 891009 - DNA, 75 bp, synthetic construct
  source 1..75: mol_type = other DNA
tttgaaggcggcggaggtcaggacttcggtctggcggcagcaattgccacgctgatcttcctgctggtgggtgcg

SEQ ID NO: 891010 - DNA, 75 bp, synthetic construct
  source 1..75: mol_type = other DNA
agtccgactacgccctgcctcttactctactcagcacatggcagggcttcgtctatagtggcgttcatcattgat

SEQ ID NO: 891011 - DNA, 75 bp, synthetic construct
  source 1..75: mol_type = other DNA
cctgaccagctgtgggtggctgattttacttacgtcagcacatggcggggcttcgtctatgtggcgttcatcatt

SEQ ID NO: 891012 - DNA, 75 bp, synthetic construct
  source 1..75: mol_type = other DNA
tacatcgtggggtggcgggtctcatcgtccatggaaacgacattcgtgctggatgcactggagcaggcgttatgg

SEQ ID NO: 891013 - DNA, 75 bp, synthetic construct
  source 1..75: mol_type = other DNA
tttggcggcgagcaaaaactgcaactgaaagaaacgaccgcccagcccgaaggcgaacgcgcgaatctccgcgtg

SEQ ID NO: 891014 - DNA, 75 bp, synthetic construct
  source 1..75: mol_type = other DNA
gtgctggatgcactggagcaggcgttgtgggcccgtcggccgtccggcacaatccatcacagcgataaaggctct

SEQ ID NO: 891015 - DNA, 75 bp, synthetic construct
  source 1..75: mol_type = other DNA
tatggaaacgacattcgtgctggatgctctggagcaggcgttatgggcccgtcaaccgtccggcacagtccatca

SEQ ID NO: 891016 - DNA, 75 bp, synthetic construct
  source 1..75: mol_type = other DNA
agcagtacggggtcagaccgctatgcagcgaactgcatattgccccgtcaacgtattaccactgtcagcaacagc

SEQ ID NO: 891017 - DNA, 75 bp, synthetic construct
  source 1..75: mol_type = other DNA
gcgataaaaacgttctgctggtcgatgactccatcgtccgtggcaccacctctgaacagattatcgaaatggcac

SEQ ID NO: 891018 - DNA, 75 bp, synthetic construct
  source 1..75: mol_type = other DNA
caacaaatgaccaaaacacagatttacaaagaaatgcactgaactgcgcaggatgtgaactgatttttgaggata

SEQ ID NO: 891019 - DNA, 75 bp, synthetic construct
  source 1..75: mol_type = other DNA
acttctgactcggaaattttgcttaatatcttcgccagcgaactggataacttccgccactatccgctggaagcc

SEQ ID NO: 891020 - DNA, 75 bp, synthetic construct
  source 1..75: mol_type = other DNA
aatggggcgctttttctttcatgtgatgggtgccctggctgaaatggagcgtgaactgattgttgaacgaacaaa

SEQ ID NO: 891021 - DNA, 75 bp, synthetic construct
  source 1..75: mol_type = other DNA
gggcgttttttcttccacgttatgggtgccctggctgaaatggaacgagaactaatcatcgagcgaacgatggct

SEQ ID NO: 891022 - DNA, 75 bp, synthetic construct
  source 1..75: mol_type = other DNA
tttttcatgtgatgtcggcactggcggagatggaacgtgagttgatcgtcgaacgaacacttgccgggttggcag

SEQ ID NO: 891023 - DNA, 75 bp, synthetic construct
  source 1..75: mol_type = other DNA
gggcgtttcttttttcatgttatgggagcactggcagagatggagagagaattgattgtcgagcgtacgcgtgca

SEQ ID NO: 891024 - DNA, 75 bp, synthetic construct
  source 1..75: mol_type = other DNA
ggcagggaaatagtccgactacgccctgcctcttactctacgtcagcacatggcggggcttcgtctatgtggcgt

SEQ ID NO: 891025 - DNA, 75 bp, synthetic construct
  source 1..75: mol_type = other DNA
gtactgtggcacgtctcatggcagctatgggacttgccggtgttctccggggtaaaaaggtccgtacgaccatca

SEQ ID NO: 891026 - DNA, 75 bp, synthetic construct
  source 1..75: mol_type = other DNA
ccgatcccggaaacttcctgcgatattgcactggaaattgctcgtattctgggtaaaccgtaccgtcaggggttt

SEQ ID NO: 891027 - DNA, 75 bp, synthetic construct
  source 1..75: mol_type = other DNA
tcgcgctggaaatcgcccgtattctgggtaaaccgtatcgtcagggctttgtgaaaaaccgctacgttggtcgca

SEQ ID NO: 891028 - DNA, 75 bp, synthetic construct
  source 1..75: mol_type = other DNA
cagtatcgatacttcaacaccgatggggcgttttttcttccacatcatgggcgcgcttgctgaaatggaacgcga

SEQ ID NO: 891029 - DNA, 75 bp, synthetic construct
  source 1..75: mol_type = other DNA
taccactgtcagcaacagcggcatcatcctgataaacgtagtgcctgtgcacagcgcgatgactggctgaagaaa

SEQ ID NO: 891030 - DNA, 75 bp, synthetic construct
  source 1..75: mol_type = other DNA
agcgacattcatccggataaacgcagtgcccgagcgcagcgcgatgactggctgaagaaagagatacagcgcgta

SEQ ID NO: 891031 - DNA, 75 bp, synthetic construct
  source 1..75: mol_type = other DNA
agggagtactggcgactcgtatgacaacgcgatggcggagagcatcaatggtctttacaaagcggaggtaataca

SEQ ID NO: 891032 - DNA, 75 bp, synthetic construct
  source 1..75: mol_type = other DNA
ggtaaaaaggtccgcactaccgtcagccggaaaaccgttgccacaggtgaccgcgtaaaccgtcagttcgtggca

SEQ ID NO: 891033 - DNA, 75 bp, synthetic construct
  source 1..75: mol_type = other DNA
cggcactgagtaaatctattcaggagctggaagaagggttagcggcgcaactcttttttcgccgtagtaaaggcg

SEQ ID NO: 891034 - DNA, 75 bp, synthetic construct
  source 1..75: mol_type = other DNA
ccggatacatcgtgggatggcgggtctcatcgtccatggaaacgacattcgtgctggatgcactggagcaggcgt

SEQ ID NO: 891035 - DNA, 75 bp, synthetic construct
  source 1..75: mol_type = other DNA
gtcggccgtccggcacaatccatcacagtgataaaggttctcagtatgtatcgctggccgtaagcgtcaacggag

SEQ ID NO: 891036 - DNA, 75 bp, synthetic construct
  source 1..75: mol_type = other DNA
actcctggcatcaacaggtagtacaggcgactcgtatgacaacgcgatggcggagagcatcaatggcctttacaa

SEQ ID NO: 891037 - DNA, 75 bp, synthetic construct
  source 1..75: mol_type = other DNA
acttctggcatcaacagggagtaccggcgactcgtatgacaacgcgatggcggagagcatcaatggcctttacaa

SEQ ID NO: 891038 - DNA, 75 bp, synthetic construct
  source 1..75: mol_type = other DNA
actactggcatcaacaggtagtaccggcgactcgtatgacaacgcgatggcggagagcatcaatggcctttacaa

SEQ ID NO: 891039 - DNA, 75 bp, synthetic construct
  source 1..75: mol_type = other DNA
gtacagtggcgcgcctcatggcggttatgggacttgccggtgttctccgggtaaaaggtccgtactaccgtcagc

SEQ ID NO: 891040 - DNA, 75 bp, synthetic construct
  source 1..75: mol_type = other DNA
agggaacacaggcgactcgtatgacaacgcgatggcggagagcatccatggtctttacaaagcggaggtaataca

SEQ ID NO: 891041 - DNA, 75 bp, synthetic construct
  source 1..75: mol_type = other DNA
actgctggcatcaacaggcagtactggcgactcgtatgacaacgcgatggcggagagcatcaatggcctttacaa

SEQ ID NO: 891042 - DNA, 75 bp, synthetic construct
  source 1..75: mol_type = other DNA
cgggaaggtatcagagtggccagatgcactgtggcacgtctcatggcggttatgggacttgccggtgttctccgg

SEQ ID NO: 891043 - DNA, 75 bp, synthetic construct
  source 1..75: mol_type = other DNA
acgtattaccactgtcagcagcagcggcatcatcctgataaacgcagtgcccgtgcgcagcgcgatgactggctg

SEQ ID NO: 891044 - DNA, 75 bp, synthetic construct
  source 1..75: mol_type = other DNA
tacgccggagactctgcgtgtctgggttcgccagcatgagcgggataccgggggcggtgatggtgggctcacccg

SEQ ID NO: 891045 - DNA, 75 bp, synthetic construct
  source 1..75: mol_type = other DNA
cgtaagagctggaaaaaccgtgcagaagtggaactggccacactcacgtgggtggactggtataacaatcgacga

SEQ ID NO: 891046 - DNA, 75 bp, synthetic construct
  source 1..75: mol_type = other DNA
ggaggtaatacaccgtaagagttggaaaaaccggacagaagtggaactggccacactaacgtgggtggactggta

SEQ ID NO: 891047 - DNA, 75 bp, synthetic construct
  source 1..75: mol_type = other DNA
tcgcgctggaaattgcccgaattctgggcaaaccgtaccgccagggctttgttaaaaaccgctatgttggtcgta

SEQ ID NO: 891048 - DNA, 75 bp, synthetic construct
  source 1..75: mol_type = other DNA
gcagggggtcgtctatgtggcgttcatcattgatgtgtttgccggatacattgtggggtggcgggtctcatcgtc

SEQ ID NO: 891049 - DNA, 75 bp, synthetic construct
  source 1..75: mol_type = other DNA
gccggaaagccgttgccgcaggcgaccgcgtaaaccgtcatcaaggcaatgtgccgcgtactccgggtggcccgc

SEQ ID NO: 891050 - DNA, 75 bp, synthetic construct
  source 1..75: mol_type = other DNA
cagtgaactgcatattgccccatcaacgtattaccactgtccgcaacagcgacatcatcatgataaacgcagtgc

SEQ ID NO: 891051 - DNA, 75 bp, synthetic construct
  source 1..75: mol_type = other DNA
cagtgaactgcatattgccccgtcaacgtattaccactgtcagcaacagagacatcatcctgataaacgcagtgc

SEQ ID NO: 891052 - DNA, 75 bp, synthetic construct
  source 1..75: mol_type = other DNA
ctcatggcggttatgggactttccggtgttctccggggtaaaaaggtccgcactaccgtcagccggaaagccgtt

SEQ ID NO: 891053 - DNA, 75 bp, synthetic construct
  source 1..75: mol_type = other DNA
ctgattttacttacgtcagcacatggcaggggggcgtctatgtggcgttcatcattgatgtgtttgccggataca

SEQ ID NO: 891054 - DNA, 75 bp, synthetic construct
  source 1..75: mol_type = other DNA
ccgcgtaaactgtcagttcggggcagaacatcctgaccagttgtgggtggctgattttacttacgtcagcacatg

SEQ ID NO: 891055 - DNA, 75 bp, synthetic construct
  source 1..75: mol_type = other DNA
acaacgtaatgcgctgaactgtgcaggatgtgagctgatttttgaagacaagataagcggtacaaagtccgaaag

SEQ ID NO: 891056 - DNA, 75 bp, synthetic construct
  source 1..75: mol_type = other DNA
ctcaggacattatcggagggggatacactggtagtctggaagctggaccggctggggcgtagtatgcggcatctg

SEQ ID NO: 891057 - DNA, 75 bp, synthetic construct
  source 1..75: mol_type = other DNA
attgataccagcacgccgatggggcgttttttctttcatgtgatgggtgccctggccgaaatggaacgagaactc

SEQ ID NO: 891058 - DNA, 75 bp, synthetic construct
  source 1..75: mol_type = other DNA
ggtgccctggctgaaatggaacgtgaactgattgttgaacgaacaaaagcaggactggaagctgctcgcgcatag

SEQ ID NO: 891059 - DNA, 75 bp, synthetic construct
  source 1..75: mol_type = other DNA
caacaaatgaccagaatacggaattgcagcgtaacgcgctggagtgcgcaggatgtgagctgatttttgaggata

SEQ ID NO: 891060 - DNA, 75 bp, synthetic construct
  source 1..75: mol_type = other DNA
acttacaccagaacaatgggcacaagctggacgattaattgcagcaggaactcctcgccagaaggtggcgattat

SEQ ID NO: 891061 - DNA, 75 bp, synthetic construct
  source 1..75: mol_type = other DNA
gtcttctggcggcccggtaccgtcagaatatagccttgggcaaatcattcgtgcgtggtcaccgtttttaatctt

SEQ ID NO: 891062 - DNA, 75 bp, synthetic construct
  source 1..75: mol_type = other DNA
actgtcgattggcatggtgctggcatttgccttcgtcaccaactattccggtatgtccaccacgctggcgctggt

SEQ ID NO: 891063 - DNA, 75 bp, synthetic construct
  source 1..75: mol_type = other DNA
gtctcactcgctttattccttaaagtctggcggccgaaaaataccgaaacggcaatcagcatggggcaatccgca

SEQ ID NO: 891064 - DNA, 75 bp, synthetic construct
  source 1..75: mol_type = other DNA
tatcgacggctgaacaggacaccgccttgcagacggatgcactgcgcaaggcgggctgcgagcgcgtctttgagg

SEQ ID NO: 891065 - DNA, 75 bp, synthetic construct
  source 1..75: mol_type = other DNA
actggcaggtacaggcgtgatgttcccgttcttctcaccgttcctcggctggctgggcgtattccttaccggctc

SEQ ID NO: 891066 - DNA, 75 bp, synthetic construct
  source 1..75: mol_type = other DNA
aaaggtattggcgtctttgccgaaacgctaattagtctgaagtggccgatattgtcgattggcatggtgctggca

SEQ ID NO: 891067 - DNA, 75 bp, synthetic construct
  source 1..75: mol_type = other DNA
gggctttagcagaaatggaacgtgaattaattgttgagagaacactggccggactggcagctgcacgcgaacagg

SEQ ID NO: 891068 - DNA, 75 bp, synthetic construct
  source 1..75: mol_type = other DNA
gacctctgcgaggtacgaatccgaaccggccagacggaggttgctgttttcgtagactacgaatctagagagtaa

SEQ ID NO: 891069 - DNA, 75 bp, synthetic construct
  source 1..75: mol_type = other DNA
ggtaacgaggaaagacctctgcgaggtacgaatccgaaccgggcagacggaggtcgctgtcttcgtagactacga

SEQ ID NO: 891070 - DNA, 75 bp, synthetic construct
  source 1..75: mol_type = other DNA
atgttaatcgccctgatcgtcatctgtttaaccgtcatagtgacggcactggtaacgaggaaagacctttgcgag

SEQ ID NO: 891071 - DNA, 75 bp, synthetic construct
  source 1..75: mol_type = other DNA
attctggacagtcggggaaatatccagcgttttaaccggttatgtgaagagtacacggggctgaaagaacacgat

SEQ ID NO: 891072 - DNA, 75 bp, synthetic construct
  source 1..75: mol_type = other DNA
gtatttcactttcaccgcaacatggcccagacagtgcggcaattattcgccacgccgatacggcaatgtacagtg

SEQ ID NO: 891073 - DNA, 75 bp, synthetic construct
  source 1..75: mol_type = other DNA
tattcacaaacaacctgtctcgcagtcactggtccgggcgatcgtcgctgtggcccaggcattgaatcttcaggt

SEQ ID NO: 891074 - DNA, 75 bp, synthetic construct
  source 1..75: mol_type = other DNA
atgagagacaaggatttttgtttgccaaaccgatgcctgccgtagctttcgaacgctggtataaacgatatctga

SEQ ID NO: 891075 - DNA, 75 bp, synthetic construct
  source 1..75: mol_type = other DNA
acattatcggaaggtgacactctggttgtctggaagctggacaggctggggcgtagtatgcggcatctggtcatt

SEQ ID NO: 891076 - DNA, 75 bp, synthetic construct
  source 1..75: mol_type = other DNA
ggactggaagcggccagagccaaaggtcgtattggtggcggacgaccgaaactcactgcgggtgagtgggagcag

SEQ ID NO: 891077 - DNA, 75 bp, synthetic construct
  source 1..75: mol_type = other DNA
cgtcatagtgacggcactggtaacgaggaaggacctctgcgaggtacgaatccgaaccggccagacggaggtcgc

SEQ ID NO: 891078 - DNA, 75 bp, synthetic construct
  source 1..75: mol_type = other DNA
gacgattttggtaccggctactcttcactttcgcaactggcgcgctttccgatcgatgccatcaaacttgaccag

SEQ ID NO: 891079 - DNA, 75 bp, synthetic construct
  source 1..75: mol_type = other DNA
ggtaacgaggaaagacctctgcgaggtacgaatccgaaccggccagacggaggtcgctgtcttcacagcttacga

SEQ ID NO: 891080 - DNA, 75 bp, synthetic construct
  source 1..75: mol_type = other DNA
ttacatcaacaggtaatgaaagcagcgcccattgtcgcccagtcgacgccaatggatgcggtatttaaattcgat

SEQ ID NO: 891081 - DNA, 75 bp, synthetic construct
  source 1..75: mol_type = other DNA
ggcgcggaggcgttgtgccgttgggtgtctgcggagcgggggatcatttcaccgctgaagttcattaccattgct

SEQ ID NO: 891082 - DNA, 75 bp, synthetic construct
  source 1..75: mol_type = other DNA
tgacgcgaaactcaacgaaatagaagagaatatctggattgcgcgtaatattcgccatgcaatggaaattggcga

SEQ ID NO: 891083 - DNA, 75 bp, synthetic construct
  source 1..75: mol_type = other DNA
ccgaaattgaacggtcaaataaattgctctcactgatctcttacgatcaggaaagcggttttattaaaaatatgg

SEQ ID NO: 891084 - DNA, 75 bp, synthetic construct
  source 1..75: mol_type = other DNA
tgttcaggctcaggggtatctgtaccagaaacccatgccattctccgcctgggataaaagtggaaaattagtaaa

SEQ ID NO: 891085 - DNA, 75 bp, synthetic construct
  source 1..75: mol_type = other DNA
ttttatctgccgtttgcgttcattattatcgtattgctggtggtttatttaatgaccactcgtgtgttccgtcgg

SEQ ID NO: 891086 - DNA, 75 bp, synthetic construct
  source 1..75: mol_type = other DNA
gctcaggggtatctgtaccagaaacccatgccattctccgcctgggataaaagtggaaaattagtaaaagagtag

SEQ ID NO: 891087 - DNA, 75 bp, synthetic construct
  source 1..75: mol_type = other DNA
tctacaaatgaaaaaaaaatagatgtatatatcggttcgagtcgaatcacatcattcactctggatggtatttcc

SEQ ID NO: 891088 - DNA, 75 bp, synthetic construct
  source 1..75: mol_type = other DNA
gctttttattaatgtcctcttttctgccattatcagcaatggcaggttctaccgtttggacggtaggaggtgagc

SEQ ID NO: 891089 - DNA, 75 bp, synthetic construct
  source 1..75: mol_type = other DNA
cacaacggcaatctgaccaacgctcacgagttgcgtaaaaaactgtttgaagaaaaacgccgccacatcaacacc

SEQ ID NO: 891090 - DNA, 75 bp, synthetic construct
  source 1..75: mol_type = other DNA
ttgataacgctggatatcaaagagttttcaatgctgtcaggaataagggaaagcgaaatataccatcatattcgt

SEQ ID NO: 891091 - DNA, 75 bp, synthetic construct
  source 1..75: mol_type = other DNA
gtgttaatttccgtagtctgacggacagcattgacacgtcaacacccatggggcgtttcttttttcacgtcatgg

SEQ ID NO: 891092 - DNA, 75 bp, synthetic construct
  source 1..75: mol_type = other DNA
gcgttaattttcgcagcctgacggatgctattgataccagcacaccaatggggcgctttttctttcatgtgatgg

SEQ ID NO: 891093 - DNA, 75 bp, synthetic construct
  source 1..75: mol_type = other DNA
aggcactgaaaattcgtgacggcgatgcgaaagagattatcagcatcaaaaattcgatcgcggaaatgaaagatg

SEQ ID NO: 891094 - DNA, 75 bp, synthetic construct
  source 1..75: mol_type = other DNA
agggacgcgtaggtggaaggcccaacgcattaaaagcgcatgagcgggaacagattgggcggctattggcgaagg

SEQ ID NO: 891095 - DNA, 75 bp, synthetic construct
  source 1..75: mol_type = other DNA
agatagcattgataccagtactgccatggggcgcttctttttccatgtgatgtcggcgctggcggagatggaacg

SEQ ID NO: 891096 - DNA, 75 bp, synthetic construct
  source 1..75: mol_type = other DNA
tggtctggaaactggaccggctggggcgcagtatgcggcatcttgtcgtgctggtggaggagttgcgcgaacgag

SEQ ID NO: 891097 - DNA, 75 bp, synthetic construct
  source 1..75: mol_type = other DNA
atggcgcactccgcaatggcacgtaaagagtcccgcggcgcgcaccagcgtctggacgaaggttgcaccgagcgt

SEQ ID NO: 891098 - DNA, 75 bp, synthetic construct
  source 1..75: mol_type = other DNA
gggatccaactcactggcagaactggtggtcttcggtcgtctggccggtgagcaagctatggagcgcgcatctac

SEQ ID NO: 891099 - DNA, 75 bp, synthetic construct
  source 1..75: mol_type = other DNA
attacgtgctgcaattgctgccgcgcaggcaaatccaaatgcaaaaatcgcactaatctcaaaagtatacccgat

SEQ ID NO: 891100 - DNA, 75 bp, synthetic construct
  source 1..75: mol_type = other DNA
cgtcttcaaaaaggtgacacactggttgtctggaaactggatcgcctcgggcgaagcatgaaacatttgatttct

SEQ ID NO: 891101 - DNA, 75 bp, synthetic construct
  source 1..75: mol_type = other DNA
ggactggcggcagcgcgcgcacgggggcgcacaggcggacgtcgcccgaagctgacaaaagaacagcatgagcaa

SEQ ID NO: 891102 - DNA, 75 bp, synthetic construct
  source 1..75: mol_type = other DNA
ttgatattgataacatggcagatttgttgggttttttcgtatcgatgacaaaatcctattttgctagtgctattt

SEQ ID NO: 891103 - DNA, 75 bp, synthetic construct
  source 1..75: mol_type = other DNA
tgctattgataccagcacaccgatggggcgttttttctttcatgtgatgggtgccctggctgaaatggaacgaga

SEQ ID NO: 891104 - DNA, 75 bp, synthetic construct
  source 1..75: mol_type = other DNA
ctgacagtattgataccagcaccccaatgggccgtttcttttttcatgtcatgggtgccctggctgaaatggaac

SEQ ID NO: 891105 - DNA, 75 bp, synthetic construct
  source 1..75: mol_type = other DNA
caacaaatgaccagaacaccgatttgcaacgtaatgcactgaactgcacgggatgtgagcggatttttgaggata

SEQ ID NO: 891106 - DNA, 75 bp, synthetic construct
  source 1..75: mol_type = other DNA
aggatgtggttgacgcagtgctggctgcgaaagcgcgtggaaatcgggtgattgcggttggcaccacctctgttc

SEQ ID NO: 891107 - DNA, 75 bp, synthetic construct
  source 1..75: mol_type = other DNA
gatatggataatgacttcaagacctgggtaggggtgatccattcctttgcacgccataaggttatcggcgataag

SEQ ID NO: 891108 - DNA, 75 bp, synthetic construct
  source 1..75: mol_type = other DNA
atggctgagaaattggcgcttttagagaaacttggcatcacgctcgatgacctggaaaaactcttcaaatcccgc

SEQ ID NO: 891109 - DNA, 75 bp, synthetic construct
  source 1..75: mol_type = other DNA
ggcgccgatatcactggcgcgtctgcgggcccgcctgaatctgaaatccccggtgttctcacagaaccagacggt

SEQ ID NO: 891110 - DNA, 75 bp, synthetic construct
  source 1..75: mol_type = other DNA
gcctgcgcaggtttactgatctctttcatcctgccgcaaaaatggaccagcgcggcggttgtcacgcctccagaa

SEQ ID NO: 891111 - DNA, 75 bp, synthetic construct
  source 1..75: mol_type = other DNA
caaaagcacatgtcaacgatgtgaattttacgccgtttaaatatcagttaagcccgtcattgccagtgaaaaaag

SEQ ID NO: 891112 - DNA, 75 bp, synthetic construct
  source 1..75: mol_type = other DNA
ctgaagtctcctgtgcgcctgaagaaataccggtcttaccggggaaatatgggactcgctgcagaaaatatcctt

SEQ ID NO: 891113 - DNA, 75 bp, synthetic construct
  source 1..75: mol_type = other DNA
ctgtgcgcctgaagaaataccggtcttaccggggaaatatgggactcactgcagaaaatatccttcagcggcagt

SEQ ID NO: 891114 - DNA, 75 bp, synthetic construct
  source 1..75: mol_type = other DNA
aggccgcgattttcctgtttttctgcatccgcaaacgcatgaagagtatgcgctggcacgtaccgaacggaaatc

SEQ ID NO: 891115 - DNA, 75 bp, synthetic construct
  source 1..75: mol_type = other DNA
gggacttgacgtgaatattgatcgtggtgatgtatttaatctgtttatcaaaaagtttcagtctgttagtttgct

SEQ ID NO: 891116 - DNA, 75 bp, synthetic construct
  source 1..75: mol_type = other DNA
cctgtctgcgccagtgacgaacacggagaagcactttttaacctcgcgcagccacactttccgttactgaattac

SEQ ID NO: 891117 - DNA, 75 bp, synthetic construct
  source 1..75: mol_type = other DNA
ttggcgattcgtcttcataaactgactgttgctttaggtgtctttattgttagcgctcctgccttttcgcatggt

SEQ ID NO: 891118 - DNA, 75 bp, synthetic construct
  source 1..75: mol_type = other DNA
cgggcccgcctgaatctgaaatccccggtgttctcacagaaccagacggtgaggcgtgccatggagcagctccgg

SEQ ID NO: 891119 - DNA, 75 bp, synthetic construct
  source 1..75: mol_type = other DNA
tattttcccagaaccagacggtcagacgggcaatggagcagctgcgcgagattggatatcttgattacacggaga

SEQ ID NO: 891120 - DNA, 75 bp, synthetic construct
  source 1..75: mol_type = other DNA
ccagtcatcccgcaggctgcgtgagcgcatcagcccttccctgaagcgcattgccggtaccgtgatctcgttttc

SEQ ID NO: 891121 - DNA, 75 bp, synthetic construct
  source 1..75: mol_type = other DNA
aagggaaaatctttcattcgcagatccgccatctgttgcaacagttagaaagcaacctggcagagctgcgtggcg

SEQ ID NO: 891122 - DNA, 75 bp, synthetic construct
  source 1..75: mol_type = other DNA
ctccaggaaacccggggcggttcacctacagagtaccgctaccacttgtgaagctggcagattcagattgttttc

SEQ ID NO: 891123 - DNA, 75 bp, synthetic construct
  source 1..75: mol_type = other DNA
atgccactgctggataagctgcgtgagcagtacggggtcagaccggtatgcagtgaactgcatattgccccgtca

SEQ ID NO: 891124 - DNA, 75 bp, synthetic construct
  source 1..75: mol_type = other DNA
tcgcacgtcgtgtcgctcaagagctgggatggagtgttcccgacttcaaaggatatgcagagccagaacgtgaag

SEQ ID NO: 891125 - DNA, 75 bp, synthetic construct
  source 1..75: mol_type = other DNA
cgggattgattccctggcggtcgccatcggcacggctcatggtatgtatgccagcgcaccggcgcttgatttttc

SEQ ID NO: 891126 - DNA, 75 bp, synthetic construct
  source 1..75: mol_type = other DNA
cgaccgatccccgggattatttgcagtcggctaaatccgcaatgcgcgatgtggtgagcaaagtgattgccgatt

SEQ ID NO: 891127 - DNA, 75 bp, synthetic construct
  source 1..75: mol_type = other DNA
tgaatttgccgaggcaaccggaattgattccctggcggtcgccatcggcacggctcatgggatgtatgccagcgc

SEQ ID NO: 891128 - DNA, 75 bp, synthetic construct
  source 1..75: mol_type = other DNA
cacagaaagtgttggccgggtatatcgattatatctctgcgttggtggtgaaagagtcgggtgatgctgccaact

SEQ ID NO: 891129 - DNA, 75 bp, synthetic construct
  source 1..75: mol_type = other DNA
atcggcaccgctcacggtatgtatgccagtgctccggcgctggatttctcccgccttgaggccattcgtcagcag

SEQ ID NO: 891130 - DNA, 75 bp, synthetic construct
  source 1..75: mol_type = other DNA
cattcgccaaacaatcaacctgggtatttgcaaaatcaatgtcgcgacggagctgaaaaatgccttctcgcaggc

SEQ ID NO: 891131 - DNA, 75 bp, synthetic construct
  source 1..75: mol_type = other DNA
aaagccgtcgttgaagcgggatttaaaggtgtggagattcgcgaggagctgacccgacggcggattgcggcggta

SEQ ID NO: 891132 - DNA, 75 bp, synthetic construct
  source 1..75: mol_type = other DNA
cgtgatggaaaacctgctgctggaatcggcggataaactgctgcgttacaaaggaatgctgtggattgacggcga

SEQ ID NO: 891133 - DNA, 75 bp, synthetic construct
  source 1..75: mol_type = other DNA
accgcatagcacgatggtgtttatcgggattcagctgccagaggaagagataagggcggcgtttgcggggttgag

SEQ ID NO: 891134 - DNA, 75 bp, synthetic construct
  source 1..75: mol_type = other DNA
acgaatacataacttactggaatcaaaaaagaataaaactcagtcttgggggactcagcccggtagaataccgga

SEQ ID NO: 891135 - DNA, 75 bp, synthetic construct
  source 1..75: mol_type = other DNA
cgatgagtgaactgttgcaaaagctgacccgtagctgttttgccgaccgggacgcactggactcggcgcgaacac

SEQ ID NO: 891136 - DNA, 75 bp, synthetic construct
  source 1..75: mol_type = other DNA
agcacaatggtgtttatcgggattcagctgccggaggatgagattcgggcggcgtttgcggggttgaggaagtaa

SEQ ID NO: 891137 - DNA, 75 bp, synthetic construct
  source 1..75: mol_type = other DNA
accgcatagcacaatggtgtttatcgggattcagctgccggaggatgagattcgggcagcgtttgcggggttgag

SEQ ID NO: 891138 - DNA, 75 bp, synthetic construct
  source 1..75: mol_type = other DNA
ggatcaattaaaagaagcgaaaatcgacccactggatctgcatcgcgccattgttgcattgagggaaaaaatgaa

SEQ ID NO: 891139 - DNA, 75 bp, synthetic construct
  source 1..75: mol_type = other DNA
cgctaaatttgaagctgtcgcctcccgctggtgggatcttgaaggtgagttcaaaccgctgcaccgcattaaccc

SEQ ID NO: 891140 - DNA, 75 bp, synthetic construct
  source 1..75: mol_type = other DNA
tatattttgcgcatggtgcccaaaggcacgcatgatgtgaagaagtttattaaaccggcagaactgcttggctgg

SEQ ID NO: 891141 - DNA, 75 bp, synthetic construct
  source 1..75: mol_type = other DNA
gctggaaaatgccgttaacgaatacataacttactgggaatcaaaaaagaataaaactcagtcttgggggactca

SEQ ID NO: 891142 - DNA, 75 bp, synthetic construct
  source 1..75: mol_type = other DNA
gttgtatacttcctggacattaagtttcaccgcacccaccagtgaagaagcgcagacagtattggcagggtatat

SEQ ID NO: 891143 - DNA, 75 bp, synthetic construct
  source 1..75: mol_type = other DNA
gagctggaaaatgccgttaacgaatacataacttactggaatcaaaaaagaataaaactcagtcttgggggactc

SEQ ID NO: 891144 - DNA, 75 bp, synthetic construct
  source 1..75: mol_type = other DNA
cggaagtggcaaaagaggattttgcgaacattgttgctgccctcagtcaactgacggtttccttcactgcatggc

SEQ ID NO: 891145 - DNA, 75 bp, synthetic construct
  source 1..75: mol_type = other DNA
ctgttcgggatgcattgttagggctaccggtcaaagacagagattgggtggtggtcggcagtacgccacaggaga

SEQ ID NO: 891146 - DNA, 75 bp, synthetic construct
  source 1..75: mol_type = other DNA
ggaaagccttgcagaaggagaaaaaccgctgctccacagtgatcaagggtggcaataccggataaaaagttatca

SEQ ID NO: 891147 - DNA, 75 bp, synthetic construct
  source 1..75: mol_type = other DNA
tgaacaccggggatgttatgggtaccggcggatccattgtgagcttcagaaaagaggtcttaagttcagtggcaa

SEQ ID NO: 891148 - DNA, 75 bp, synthetic construct
  source 1..75: mol_type = other DNA
tgacgctctcaatggcggcgatgctaagtccgcaggtcgatgtccgtttcgcaactttatgccacgatctcggta

SEQ ID NO: 891149 - DNA, 75 bp, synthetic construct
  source 1..75: mol_type = other DNA
aaggcgtggagatccgcgaggagctgacacgacgccgaattgcggcggtggctacctggaaggaacaacgttgcc

SEQ ID NO: 891150 - DNA, 75 bp, synthetic construct
  source 1..75: mol_type = other DNA
tggaagatgatcttaagcgtcgcgatctgaccattaatgcgctggcccaggacgataacggcgagattatcgacc

SEQ ID NO: 891151 - DNA, 75 bp, synthetic construct
  source 1..75: mol_type = other DNA
cggaacagtacggtaaaaacgagatggcgctcctgctgcttgaagaactggatactgccgcacagggaataacgc

SEQ ID NO: 891152 - DNA, 75 bp, synthetic construct
  source 1..75: mol_type = other DNA
atgctcgacagccttgcccgctacccggaggtggcaaaagaggattttgcgaacattgttgccgctcttaatcaa

SEQ ID NO: 891153 - DNA, 75 bp, synthetic construct
  source 1..75: mol_type = other DNA
atgagtgaactgttgcaaaagctgacccgtagctgttttgccgaccgggatgcactggatgtggcgcgaacacag

SEQ ID NO: 891154 - DNA, 75 bp, synthetic construct
  source 1..75: mol_type = other DNA
cgctctgctgggttcgctggtggcaatcgatccggcgcggacagcggtactgtgtgatacgcagcataaggactg

SEQ ID NO: 891155 - DNA, 75 bp, synthetic construct
  source 1..75: mol_type = other DNA
agcccggcaactgaaactgctgcgcctgcgggcacatcgccacgcggacaaggcggcgcttgcccggaaaatgga

SEQ ID NO: 891156 - DNA, 75 bp, synthetic construct
  source 1..75: mol_type = other DNA
tggcggaaggactggcgctgctgaccggactggtggaacgcttcggtacgcaactgctgccctcgcgcccggcca

SEQ ID NO: 891157 - DNA, 75 bp, synthetic construct
  source 1..75: mol_type = other DNA
aacgaagaatcttctgtcaaaattgatgatattcaatcactaacctgtaacgaattatatgaatatgatgtcggg

SEQ ID NO: 891158 - DNA, 75 bp, synthetic construct
  source 1..75: mol_type = other DNA
cggaaagccgttccgcaggcgaccgcgtaaaccgtcagttcgtggcagaacgcctgaccagctgtgggtggctga

SEQ ID NO: 891159 - DNA, 75 bp, synthetic construct
  source 1..75: mol_type = other DNA
cgtatgacaacgcgatggcggagagcatcaatggtctttacaaatcggaggtaatacaccgtaagagctggaaaa

SEQ ID NO: 891160 - DNA, 75 bp, synthetic construct
  source 1..75: mol_type = other DNA
tcgtggggtggcgggtctcatcgtctatggaaacgcattcgtgctggatgcgctggagcaggcgttgtgggcccg

SEQ ID NO: 891161 - DNA, 75 bp, synthetic construct
  source 1..75: mol_type = other DNA
tcagcaacagcgacatcatcctgataaacgcagtgcccgtgcgcagcgcgatgactggctgaagaaagagatact

SEQ ID NO: 891162 - DNA, 75 bp, synthetic construct
  source 1..75: mol_type = other DNA
ttgcgagggcggagttcgaccgcctctggaaaaagtgatgccctgctggataagctgcgtaagctgtacggggtc

SEQ ID NO: 891163 - DNA, 75 bp, synthetic construct
  source 1..75: mol_type = other DNA
gcactggagcaggcgttatgggcccgtcggccgtccggcacggtccatcacagtgataaaggttctcagtatgta

SEQ ID NO: 891164 - DNA, 75 bp, synthetic construct
  source 1..75: mol_type = other DNA
cagttgatgatgttcaactttctcacaagcccaggcgactaaaagaagccggattactggcatcaacagggagta

SEQ ID NO: 891165 - DNA, 75 bp, synthetic construct
  source 1..75: mol_type = other DNA
ggccgtccggcacagtccatcacagtgataaaggttctcagtatgtatcactggcctatacggagcgactaaaag

SEQ ID NO: 891166 - DNA, 75 bp, synthetic construct
  source 1..75: mol_type = other DNA
gcggaggtaatacaccgtaagagctggaaaaaccggacagaagtggagctggccacactcacgtgggtggactgg

SEQ ID NO: 891167 - DNA, 75 bp, synthetic construct
  source 1..75: mol_type = other DNA
catattgccccgtcaacgtattaccactgtcagcaacagcgacatcatccggatatgcccatgataccaaaatga

SEQ ID NO: 891168 - DNA, 75 bp, synthetic construct
  source 1..75: mol_type = other DNA
tacaggatgcaaatcagatccaactgtatcatggcgccccttatatttttacatttggggatgtggacaaacaca

SEQ ID NO: 891169 - DNA, 75 bp, synthetic construct
  source 1..75: mol_type = other DNA
gaacgacctgaccagctgtgggtggctgattttacttacgtcagcacatgtgtcagcgccagtgatataagacgg

SEQ ID NO: 891170 - DNA, 75 bp, synthetic construct
  source 1..75: mol_type = other DNA
ctcatcgtctatggaaacgacattcgtgctggatgctctggagcaggcgttttgggcccggcgtccgtccggcac

SEQ ID NO: 891171 - DNA, 75 bp, synthetic construct
  source 1..75: mol_type = other DNA
ctcatcgtctatggaaacgacattcgtgctggatgcactggagcaggcgttttgggcccgccgcccgtccggcac

SEQ ID NO: 891172 - DNA, 75 bp, synthetic construct
  source 1..75: mol_type = other DNA
gccggaaaaccgttgctgcaggtgaccgcgtaaaccgtcagttcgtggcagaacgtcctgaccagctgtgggtgg

SEQ ID NO: 891173 - DNA, 75 bp, synthetic construct
  source 1..75: mol_type = other DNA
ctcatcgtctatggaaacgacattcgtgctggatgcgctggagcaggcgttttgggcccgtcgtccgtccggcac

SEQ ID NO: 891174 - DNA, 75 bp, synthetic construct
  source 1..75: mol_type = other DNA
ctcatcgtctatggaaacgacattcgtgctggatgccctggagcaggcgttttgggcccgccgaccgtccggcac

SEQ ID NO: 891175 - DNA, 75 bp, synthetic construct
  source 1..75: mol_type = other DNA
ctcatcgtctatggaaacgacattcgtgctggatgccctggagcaggcgttttgggcccgacgcccgtccggcac

SEQ ID NO: 891176 - DNA, 75 bp, synthetic construct
  source 1..75: mol_type = other DNA
cagtatgtgtcactggcctatacggagcgactaaaagaagcaaaactgctggcatcaacagggagtacaggcgac

SEQ ID NO: 891177 - DNA, 75 bp, synthetic construct
  source 1..75: mol_type = other DNA
gcctttacaaagcggaggtaatacaccgtaagcgctggaaaaaccggacagaagtggagctgtccacactcacgt

SEQ ID NO: 891178 - DNA, 75 bp, synthetic construct
  source 1..75: mol_type = other DNA
ctgggtcatatcccaccggcagaagcagaaaaagcttattatgcttccatcagaaacgatgatctggcagcctga

SEQ ID NO: 891179 - DNA, 75 bp, synthetic construct
  source 1..75: mol_type = other DNA
atggaaacgacattcgtgctggatgcactggagcaggcgttatgggcccgtcgaccgtccggcacggtccatcac

SEQ ID NO: 891180 - DNA, 75 bp, synthetic construct
  source 1..75: mol_type = other DNA
ggtggactggtataacaatcgacgattgcaggaaaggctgggccacatccctccggcagaagcagaaaaagctta

SEQ ID NO: 891181 - DNA, 75 bp, synthetic construct
  source 1..75: mol_type = other DNA
cagcaacagcgacatcatcctgataaacgcagtgcccgtgcgcagcgcgatgactggctgaagagagagatacag

SEQ ID NO: 891182 - DNA, 75 bp, synthetic construct
  source 1..75: mol_type = other DNA
ggaactggccacactcacgtgggttgactggtataacaatcgacgattgctggaaaggctgggccatactcctcc

SEQ ID NO: 891183 - DNA, 75 bp, synthetic construct
  source 1..75: mol_type = other DNA
acgtattaccactgtcagcaacagcgacatcatcctgataaacgccgtccacatgcacagcgcgatgactggctg

SEQ ID NO: 891184 - DNA, 75 bp, synthetic construct
  source 1..75: mol_type = other DNA
acgtattaccactgtcagcaacagcgacatcatcctgataaacgccgtacacatgcccagcgcgatgactggctg

SEQ ID NO: 891185 - DNA, 75 bp, synthetic construct
  source 1..75: mol_type = other DNA
acgtattaccactgtcagcaacagcgacatcatcctgataaacgctgttcacatgcacagcgcgatgactggctg

SEQ ID NO: 891186 - DNA, 75 bp, synthetic construct
  source 1..75: mol_type = other DNA
acgtattaccactgtcagcaacagcgacatcatcctgataaacgcggtgcacatgcacagcgcgatgactggctg

SEQ ID NO: 891187 - DNA, 75 bp, synthetic construct
  source 1..75: mol_type = other DNA
acgtattaccactgtcagcaacagcgacatcatcctgataaacgcggttcacatgctcagcgcgatgactggctg

SEQ ID NO: 891188 - DNA, 75 bp, synthetic construct
  source 1..75: mol_type = other DNA
acgtattaccactgtcagcaacagcgacatcatcctgataaacgcggtacacatgcgcagcgcgatgactggctg

SEQ ID NO: 891189 - DNA, 75 bp, synthetic construct
  source 1..75: mol_type = other DNA
acactcacgtgggtggagtggtataacaatagacgattgctgggaagggtgggccatactcctccggcagaagca

SEQ ID NO: 891190 - DNA, 75 bp, synthetic construct
  source 1..75: mol_type = other DNA
acgtattaccactgtcagcaacagcgacatcatccggagaaacgcagtgcccgtgcgcagcgcgatgactggctg

SEQ ID NO: 891191 - DNA, 75 bp, synthetic construct
  source 1..75: mol_type = other DNA
tgtcagcaacagcgacatcatcctgataaacgcagtgcccgtgcgcagcgcgatgactggctgaagaaagagata

SEQ ID NO: 891192 - DNA, 75 bp, synthetic construct
  source 1..75: mol_type = other DNA
acgtattaccactgtcagcaacagcgacatcatcctgataaacgctgtacacatgctcagcgcgatgactggctg

SEQ ID NO: 891193 - DNA, 75 bp, synthetic construct
  source 1..75: mol_type = other DNA
acgtattaccactgtcagcaacagcgacatcatcctgataaacgcagtacacatgcacagcgcgatgactggctg

SEQ ID NO: 891194 - DNA, 75 bp, synthetic construct
  source 1..75: mol_type = other DNA
acgtattaccattgtcagcagcagcggcatcatcctgataaacgctgtacccgtgcgcagcgcgatgactggctg

SEQ ID NO: 891195 - DNA, 75 bp, synthetic construct
  source 1..75: mol_type = other DNA
tcttttctgttctggtgctttcaactgtattaaccgcctgcaataccacgcgcggcgttggtgaagacatttctg

SEQ ID NO: 891196 - DNA, 75 bp, synthetic construct
  source 1..75: mol_type = other DNA
gaaggtatcagggtggccagatgtacagtggcgcgcctcatggcggttatgggacttgccggtgttctccggggt

SEQ ID NO: 891197 - DNA, 75 bp, synthetic construct
  source 1..75: mol_type = other DNA
aacgtattaccactgtcagcaacagcgacatcatcctgataaacgcagtgcccgtgcgcagcgcgatgactggct

SEQ ID NO: 891198 - DNA, 75 bp, synthetic construct
  source 1..75: mol_type = other DNA
gagttcgaccgcctctggaaaaagtgatgccactgctggataagctgcgtaagctgtacggggtcggaccggtat

SEQ ID NO: 891199 - DNA, 75 bp, synthetic construct
  source 1..75: mol_type = other DNA
catccatcacagcgataaaggctctcagtatgtgtcactggcctatacggagcgattaaaagaagcaaaactgct

SEQ ID NO: 891200 - DNA, 75 bp, synthetic construct
  source 1..75: mol_type = other DNA
acgtattaccactgtcagcaacagcgatatcatcctgataaacgcagtgcccgtgcgcagcacgacgactggctg

SEQ ID NO: 891201 - DNA, 75 bp, synthetic construct
  source 1..75: mol_type = other DNA
aagcaaaactgctggcatcaacagggagtacaggtgactcgtatgacaacgcgatggcggagagcatcaatggtc

SEQ ID NO: 891202 - DNA, 75 bp, synthetic construct
  source 1..75: mol_type = other DNA
cagaagtggaactggccacactcacgtgggtggactggtataacaatcgatgattgctgggaaggcagggccata

SEQ ID NO: 891203 - DNA, 75 bp, synthetic construct
  source 1..75: mol_type = other DNA
cagaagtggaactggccacactcacgtgggtggactggtataacaatcgaagattgctgggaaggctgggccata

SEQ ID NO: 891204 - DNA, 75 bp, synthetic construct
  source 1..75: mol_type = other DNA
atggtggagaagcttgccttgcttgaaaaactgggtatctcgctggatgatctggaaaaactcttcaaatcccgc

SEQ ID NO: 891205 - DNA, 75 bp, synthetic construct
  source 1..75: mol_type = other DNA
accgcgtaaaccgtcagttcgtggcagaacgtcctgaccagttgtgggtggctgattttaattacgtcagcacat

SEQ ID NO: 891206 - DNA, 75 bp, synthetic construct
  source 1..75: mol_type = other DNA
cagaagtggaactggccacactcacgtgggtggactggtataacaatcgaggattgctggtaaggccgggccata

SEQ ID NO: 891207 - DNA, 75 bp, synthetic construct
  source 1..75: mol_type = other DNA
cagaagtggaactggccacactcacgtgggtggactggtataacaatcgacgattgctggtaaggcggggccata

SEQ ID NO: 891208 - DNA, 75 bp, synthetic construct
  source 1..75: mol_type = other DNA
gtcacaggggctgcgtcacacacccggtgacattattgaaatctgtgataatgactatgccgggaccctgaccgg

SEQ ID NO: 891209 - DNA, 75 bp, synthetic construct
  source 1..75: mol_type = other DNA
gtactcgcaacattgctgaactaggcacccgtgatctgttaattcctattaaagccgtggagaaatccgggcgtc

SEQ ID NO: 891210 - DNA, 75 bp, synthetic construct
  source 1..75: mol_type = other DNA
gtgaaatcacgctgccgtcttccggcaccacgctgataagcctggtcgacgggaagggggagccggtcagcgtgg

SEQ ID NO: 891211 - DNA, 75 bp, synthetic construct
  source 1..75: mol_type = other DNA
cgccaaccagattgaaggcgatctcgttaaaacagtgggcaaagctttcccccgggactcccgtgcaccggagcg

SEQ ID NO: 891212 - DNA, 75 bp, synthetic construct
  source 1..75: mol_type = other DNA
aaggtggtgaagggcgtgagcttcctgcttcgcctgaccgtggcagcggatgacggccgtgagcggctggtcagc

SEQ ID NO: 891213 - DNA, 75 bp, synthetic construct
  source 1..75: mol_type = other DNA
gttttcgctacagcttcagcgccctgaaggaccgccacacggcggtggaggtgaattacaccgacccgcagaacg

SEQ ID NO: 891214 - DNA, 75 bp, synthetic construct
  source 1..75: mol_type = other DNA
atgccgtctgatagtgcggaaaaacggtgctgaaatttataaccgtaccgcgctggataatacgctgatttatac

SEQ ID NO: 891215 - DNA, 75 bp, synthetic construct
  source 1..75: mol_type = other DNA
ggtgtgttgcgtacagaacagacgctgtcggatcaggcttatgagcgcctgaagaaagattttgaggagcgtcac

SEQ ID NO: 891216 - DNA, 75 bp, synthetic construct
  source 1..75: mol_type = other DNA
ccagcggcaccatcacggtaagaatcagtgatgatcagaagtttgaccggcaggtcatgataccgccagtgttat

SEQ ID NO: 891217 - DNA, 75 bp, synthetic construct
  source 1..75: mol_type = other DNA
cccgcagaacggctggcagacctccacggaactggtggaagacccggaagccatactgcgctacgggcgcaacct

SEQ ID NO: 891218 - DNA, 75 bp, synthetic construct
  source 1..75: mol_type = other DNA
gtgagagatttactaacgacgatttatcgttatcggggatttatctggagcagtgttaaacgtgattttcaggcg

SEQ ID NO: 891219 - DNA, 75 bp, synthetic construct
  source 1..75: mol_type = other DNA
ctgggacacgccgaaggtggtgaagggcgtgagctttatgcttcgcctgaccgtggcagcggatgacggcagtga

SEQ ID NO: 891220 - DNA, 75 bp, synthetic construct
  source 1..75: mol_type = other DNA
gggaatatggcctctgaatgccatatcaactgggcctgggttgaaggcttccgccaggcacgggatgaaggctgc

SEQ ID NO: 891221 - DNA, 75 bp, synthetic construct
  source 1..75: mol_type = other DNA
attaacagctatggccagcagggcgaaccggccaccaccaccttccggattaacgcgccagcaaaacccgccacc

SEQ ID NO: 891222 - DNA, 75 bp, synthetic construct
  source 1..75: mol_type = other DNA
gaatacaccctgacggtcagggcgattaacagttatggccagcagggggaaccggccaccaccacgttcaggatt

SEQ ID NO: 891223 - DNA, 75 bp, synthetic construct
  source 1..75: mol_type = other DNA
gtctgttgttgcacctgctgtatacgttggaacctggcacaaatacaactgtggaagcatcgctggccgctggtt

SEQ ID NO: 891224 - DNA, 75 bp, synthetic construct
  source 1..75: mol_type = other DNA
ccggagctgaaaccggactgggcgtggaagtgacgaaggcaaaaccggtgacgcgcaccattacgtccgcgaaca

SEQ ID NO: 891225 - DNA, 75 bp, synthetic construct
  source 1..75: mol_type = other DNA
tgggaaaactgtccgcgaaccagattgaaggcgatctcgttaaaacagtgggcaaagctttcccccgggactccc

SEQ ID NO: 891226 - DNA, 75 bp, synthetic construct
  source 1..75: mol_type = other DNA
gaaggatggccatattgatacaataattggcctgcccgcaaatctgttcttctctactggtattccggtatgtat

SEQ ID NO: 891227 - DNA, 75 bp, synthetic construct
  source 1..75: mol_type = other DNA
tcattaatggacaaactgttttttcgccacatggctggagtgatttttgtccgctgaaagagggggcgttatgtc

SEQ ID NO: 891228 - DNA, 75 bp, synthetic construct
  source 1..75: mol_type = other DNA
tctcaggggctctaaaagctgtcgttatggcgaccggcttcgagaaccctttgtcctcagttaatgaaattgaga

SEQ ID NO: 891229 - DNA, 75 bp, synthetic construct
  source 1..75: mol_type = other DNA
caaactgacttttactttacgtaatcatcctgagtacctagaagcctctgttttgtctcccgatgatgtacgcca

SEQ ID NO: 891230 - DNA, 75 bp, synthetic construct
  source 1..75: mol_type = other DNA
aggactggagcgctgaatgtcaaaggggcattagtgtcatctccgtgcatactggatacaccagaagtaaaagtt

SEQ ID NO: 891231 - DNA, 75 bp, synthetic construct
  source 1..75: mol_type = other DNA
actggatgagttttcgaaagagtggaaagacgccagtgataaatggaatgccatgtggggcgtcaaaattgagca

SEQ ID NO: 891232 - DNA, 75 bp, synthetic construct
  source 1..75: mol_type = other DNA
agtatcaatattaagccgggccatgattattatttttacgttcgcagtgtgaacacagtcggcaaatcgacattt

SEQ ID NO: 891233 - DNA, 75 bp, synthetic construct
  source 1..75: mol_type = other DNA
ttgcctctcgggtgactatggaaagccagtcattgcgccgccaggctatcgtacagtcggcgctggaatggggta

SEQ ID NO: 891234 - DNA, 75 bp, synthetic construct
  source 1..75: mol_type = other DNA
gcaaccggtgcccgggtttgtctgcgtttactggcagataatgaaatcttgctgattgccggttatgaaggcgtt

SEQ ID NO: 891235 - DNA, 75 bp, synthetic construct
  source 1..75: mol_type = other DNA
cagaaggagttggggtcagactacccgcgacagattgacggttcggtctccacgccactgcagctttggtacgaa

SEQ ID NO: 891236 - DNA, 75 bp, synthetic construct
  source 1..75: mol_type = other DNA
atattcatgaacgacgtgttcctgaaacgcctgacggctccgaccattaccagcggcggtaatcctccggcattt

SEQ ID NO: 891237 - DNA, 75 bp, synthetic construct
  source 1..75: mol_type = other DNA
gaacaccgttggcaaatcggcatttgtggaggctgttggtcagccgagtgatgacgcatccggctatctggattt

SEQ ID NO: 891238 - DNA, 75 bp, synthetic construct
  source 1..75: mol_type = other DNA
atgctgatatcagcggtaacgtgaatgcgaactccgggacgctcaataatgtcacggtaaatgaaaactgtacga

SEQ ID NO: 891239 - DNA, 75 bp, synthetic construct
  source 1..75: mol_type = other DNA
acgctcaacaacgtcacgattaacgagaactgtcgggttctgggaaaactgtccgcgaaccagattgaaggcgat

SEQ ID NO: 891240 - DNA, 75 bp, synthetic construct
  source 1..75: mol_type = other DNA
cgcaccctgacactggaccgtgaggtgaccctgccggagacaggtgccgccacggtgaacctgattaacggcagc

SEQ ID NO: 891241 - DNA, 75 bp, synthetic construct
  source 1..75: mol_type = other DNA
caagttccgtaaagaggaaccacgttacgcacgtcgcgtcagcatggaagagattgagaaaaacgattttaattt

SEQ ID NO: 891242 - DNA, 75 bp, synthetic construct
  source 1..75: mol_type = other DNA
tggaaaaagttgatctgacggaggataacgccagcagactggatgagttttcgaaagagtggaaggacgctaacg

SEQ ID NO: 891243 - DNA, 75 bp, synthetic construct
  source 1..75: mol_type = other DNA
ctgacaccgggctattttcagataacagcggtcccgcgtcttgcggtgtatgacccgacggtacagtttgagttc

SEQ ID NO: 891244 - DNA, 75 bp, synthetic construct
  source 1..75: mol_type = other DNA
gaccaacgccaatattcttaagaagctcagctttccgcggatctgtttaccgattatcgtcactgcttcggcatt

SEQ ID NO: 891245 - DNA, 75 bp, synthetic construct
  source 1..75: mol_type = other DNA
agagcggcacggtgaatggtgtcacaccgccagcggtgcagcaccttaccgccgaagtcaccgcagacagcgggg

SEQ ID NO: 891246 - DNA, 75 bp, synthetic construct
  source 1..75: mol_type = other DNA
gtgaagggtgtgcgcttcagtctgcgcctgaccagcggaagcggagaagacagccgtctggtgaccaccgccatc

SEQ ID NO: 891247 - DNA, 75 bp, synthetic construct
  source 1..75: mol_type = other DNA
ttttttcaaaggagagatagggaaaacccatctggctcaggagttgtggactcagattgataacggtcagcttgc

SEQ ID NO: 891248 - DNA, 75 bp, synthetic construct
  source 1..75: mol_type = other DNA
tgcagcagatgcaggacggacgcctttatattgcgggtatcggtgccggtattgagaatacgccagcaggaatgc

SEQ ID NO: 891249 - DNA, 75 bp, synthetic construct
  source 1..75: mol_type = other DNA
cccgacgttttccctgacgccggaagggaagctgacagccaggaacgcggatatcagcggagcaattaccgcgaa

SEQ ID NO: 891250 - DNA, 75 bp, synthetic construct
  source 1..75: mol_type = other DNA
gaagaccaccatcaccgaaacccgcaatgaaatcacacagacggtcagtaaaacactggagaaccagagcgccac

SEQ ID NO: 891251 - DNA, 75 bp, synthetic construct
  source 1..75: mol_type = other DNA
tcatgtcaccctgacgtttaatgtgtcgtcgaccggtgcgaacaactggacgccgacaacgtacatcagcgattt

SEQ ID NO: 891252 - DNA, 75 bp, synthetic construct
  source 1..75: mol_type = other DNA
accacataccgcttcaggcaactggcgctggggcgttacacgctgacggtccgggcggtaaatgcgtgggggcag

SEQ ID NO: 891253 - DNA, 75 bp, synthetic construct
  source 1..75: mol_type = other DNA
gaaggtgaaagtgagccgtgttcctgacggcgttgctgaatacagcgtgtgggggctgaagctgccgacgttgcg

SEQ ID NO: 891254 - DNA, 75 bp, synthetic construct
  source 1..75: mol_type = other DNA
atccggggagcggaaataaccccggaggcacgcgatacacgggttatggttttgaagttcgcaaaaacggcgtat

SEQ ID NO: 891255 - DNA, 75 bp, synthetic construct
  source 1..75: mol_type = other DNA
gtttctggtctgttggcgtataacccgatggcgactattatcggttcataccagaacgtgatgctctatcaccag

SEQ ID NO: 891256 - DNA, 75 bp, synthetic construct
  source 1..75: mol_type = other DNA
aacggggcgcactttgacggcgaccagagcggcacggtgaatggtgtcacgccgcccgcggtgcagcacctgact

SEQ ID NO: 891257 - DNA, 75 bp, synthetic construct
  source 1..75: mol_type = other DNA
ggaatgccatgtggggcgtcaaaattgagcagaccgaagacggtaagcattatgtcgcggggcttggcctcagca

SEQ ID NO: 891258 - DNA, 75 bp, synthetic construct
  source 1..75: mol_type = other DNA
ataaatataaagatttcattctgaatgccatcaagcgagatttcaaaagtaggtatcaaacaagtatgctaggtg

SEQ ID NO: 891259 - DNA, 75 bp, synthetic construct
  source 1..75: mol_type = other DNA
atttttatatccgcagtgtgaatactgttggcaaatcggcattcgtggcggctgtcggtcgggcgagcgatgatg

SEQ ID NO: 891260 - DNA, 75 bp, synthetic construct
  source 1..75: mol_type = other DNA
agcgtatgggggctgaagctgccgacgctgcgccagcgcctgttccgctgtgtgagtatccgggagaacgatgac

SEQ ID NO: 891261 - DNA, 75 bp, synthetic construct
  source 1..75: mol_type = other DNA
gagttaatgcgtgcccgcctggcgggcatggatggtccttttgcctacagtatctacctctgttccggggtatta

SEQ ID NO: 891262 - DNA, 75 bp, synthetic construct
  source 1..75: mol_type = other DNA
tttcaatgtttcttcatatggtgctaataactggacgccaacgaccagtatcagcgaccttcttgttgtcgtgat

SEQ ID NO: 891263 - DNA, 75 bp, synthetic construct
  source 1..75: mol_type = other DNA
tacagtgtgtgggggctgaagttgccgacgttgcgtcagcgcctgttccgctgtgtgagtatccgtgagaacgat

SEQ ID NO: 891264 - DNA, 75 bp, synthetic construct
  source 1..75: mol_type = other DNA
gcagagtatcctggtgaacaaaaccccgctgacggacacggacggcaatcctgtgatacacggtgtgaccgcggt

SEQ ID NO: 891265 - DNA, 75 bp, synthetic construct
  source 1..75: mol_type = other DNA
tatgccgggaccatgaccggcggacgtatcctgtccatcgatgccgccagccgcaccctgacactggaccgtgag

SEQ ID NO: 891266 - DNA, 75 bp, synthetic construct
  source 1..75: mol_type = other DNA
accatgaccggcggacgtatcctgtccatcgatgccgccagccgcaccctgacactggaccgtgaggtgaccctg

SEQ ID NO: 891267 - DNA, 75 bp, synthetic construct
  source 1..75: mol_type = other DNA
ccggtgctggacagtgagaggaatactaacatctccggtgtcacggtggtgttccgggcaggtgagcaggaacag

SEQ ID NO: 891268 - DNA, 75 bp, synthetic construct
  source 1..75: mol_type = other DNA
ttggagaccacctcaaagggcgaccgtaatccctcttctgtccgactgctgattcagttgcagcgtaacggtaac

SEQ ID NO: 891269 - DNA, 75 bp, synthetic construct
  source 1..75: mol_type = other DNA
gtacagtttgaattctggttttcggaggcaaaaatcgcagacaccgcacaggtggaaaccgctgcccgttatctg

SEQ ID NO: 891270 - DNA, 75 bp, synthetic construct
  source 1..75: mol_type = other DNA
agctgacagccaggaacgcggatatcagcggagcaattaccgcgaataccggcacgctcaataatgtcaccatta

SEQ ID NO: 891271 - DNA, 75 bp, synthetic construct
  source 1..75: mol_type = other DNA
aaggacggacgcctttatattgcgggtatcggtgccggtattgagaatacgccagcaggaatgcagagtcaggtg

SEQ ID NO: 891272 - DNA, 75 bp, synthetic construct
  source 1..75: mol_type = other DNA
ggtgcagtcactggtggagaccacctcaaagggtgaccgtaacccggcaaccgtccgcctgctgattcagttaca

SEQ ID NO: 891273 - DNA, 75 bp, synthetic construct
  source 1..75: mol_type = other DNA
ggtgcagtcactggtggagaccacctcaaagggtgaccgtaacccctcttctgtccgcctgctgattcagcttga

SEQ ID NO: 891274 - DNA, 75 bp, synthetic construct
  source 1..75: mol_type = other DNA
actcccgtgcaccggagcgttggccatcaggaaccattaccgtcagggtttatgacgatcagccgtttaaccggc

SEQ ID NO: 891275 - DNA, 75 bp, synthetic construct
  source 1..75: mol_type = other DNA
ccgttatttgtggcgcaggggaatcagctgttcatgaacgacgtgttcctgaagcggctgtttgcggtgagtatc

SEQ ID NO: 891276 - DNA, 75 bp, synthetic construct
  source 1..75: mol_type = other DNA
ttcgggggcacagagccgcggatgacctttaatgcgtacctgtcacaacagcgtaaggcatgggatgtgctcagt

SEQ ID NO: 891277 - DNA, 75 bp, synthetic construct
  source 1..75: mol_type = other DNA
gtgccggtattgagaatactcctgacggtatgcagagtcaggtgctgctggcggcggacaggattgcgatgatta

SEQ ID NO: 891278 - DNA, 75 bp, synthetic construct
  source 1..75: mol_type = other DNA
gtgaaggtgaaagtgagccgggttcctgacggcgttgcagaatacagcgtgtgggggctgaagctgccgacgctg

SEQ ID NO: 891279 - DNA, 75 bp, synthetic construct
  source 1..75: mol_type = other DNA
ccgcgaacattgaccgcctgcgggttaccttcggggtgcagtcactggtggagaccacctcaaagggtgaccgta

SEQ ID NO: 891280 - DNA, 75 bp, synthetic construct
  source 1..75: mol_type = other DNA
gactgcggtctggcgtgccggggagcaggagcagacaccaccggaaggctttgagtcctccggagctgaaaccgg

SEQ ID NO: 891281 - DNA, 75 bp, synthetic construct
  source 1..75: mol_type = other DNA
tacatggtgtgaccgcggtctggcacgccggggagcaggagcagacaccacctgaaggctttgagtcctccggag

SEQ ID NO: 891282 - DNA, 75 bp, synthetic construct
  source 1..75: mol_type = other DNA
aaaagaagccattgtggataacggggccagctttgagccgcagtcaggcaccctgaacagtgttatccctccggc

SEQ ID NO: 891283 - DNA, 75 bp, synthetic construct
  source 1..75: mol_type = other DNA
gccgaagtcaccgcagacagcggggaatatcaggcgctggcgcgctgggacacgccgaaggtggtgaagggcgtg

SEQ ID NO: 891284 - DNA, 75 bp, synthetic construct
  source 1..75: mol_type = other DNA
gacggtgaactaccatatccgcggtcgcatcatccaggtgccgtcaaactatgacccggaaaaacgcacgtacag

SEQ ID NO: 891285 - DNA, 75 bp, synthetic construct
  source 1..75: mol_type = other DNA
aaaagtcagtttctggcaacgatgagtcacgaaataagaacaccaataagctctattatgggcttcctggaactt

SEQ ID NO: 891286 - DNA, 75 bp, synthetic construct
  source 1..75: mol_type = other DNA
aaccattgaccctggatgtactaaaaacacatttaagtcagttacaacaggttgcgcatattgctcccctgtatc

SEQ ID NO: 891287 - DNA, 75 bp, synthetic construct
  source 1..75: mol_type = other DNA
ccgacggtacagtttgagttctggttttcggaggcaaaaatcgcagacacatctcaggtggaaacctctgcccgt

SEQ ID NO: 891288 - DNA, 75 bp, synthetic construct
  source 1..75: mol_type = other DNA
tgaacaaaccattagaactcactgaacatgaaaaactgtggattaagcagcatcccgaattaagggtgctggaaa

SEQ ID NO: 891289 - DNA, 75 bp, synthetic construct
  source 1..75: mol_type = other DNA
tcgaggcaaaagcagaacaacccatcacactacctgaaaagttgagcatattaatcgcggatgatcatccgacca

SEQ ID NO: 891290 - DNA, 75 bp, synthetic construct
  source 1..75: mol_type = other DNA
acgccggtaccatgaccggcggacgtatcctgtccattgatgccgccagccgcaccctgacactggaccgtgagg

SEQ ID NO: 891291 - DNA, 75 bp, synthetic construct
  source 1..75: mol_type = other DNA
ttaatcgcggatgatcatccgaccaacaggctattactcaaacgccagctaaatctattaggatatgatgttgat

SEQ ID NO: 891292 - DNA, 75 bp, synthetic construct
  source 1..75: mol_type = other DNA
cggtgctatttatagtgaagatagagaaaataatgttttatttgctgaagccttcataacaacgccttacgtttt

SEQ ID NO: 891293 - DNA, 75 bp, synthetic construct
  source 1..75: mol_type = other DNA
aacagcgatgtggtggtggatgataacggcgtggggttccgctacagcttcagtgccctgaaggaccgacacacg

SEQ ID NO: 891294 - DNA, 75 bp, synthetic construct
  source 1..75: mol_type = other DNA
gcggcatgaacttatgtttgttcaaaccgttgaccctggatgtactgaaaacacatttaagtcagttacaccagg

SEQ ID NO: 891295 - DNA, 75 bp, synthetic construct
  source 1..75: mol_type = other DNA
ccttcccgaaaaaagtcggtacgtggggtaacacggaaacaccaaacggtacggttacagtcaccatcagcgatg

SEQ ID NO: 891296 - DNA, 75 bp, synthetic construct
  source 1..75: mol_type = other DNA
atccgggaaaacacggacggtacctttgccatcacggcagtgcagcatgtgccggagaaagaagccatcgtggat

SEQ ID NO: 891297 - DNA, 75 bp, synthetic construct
  source 1..75: mol_type = other DNA
aataatacggcgaacgatctacaactgatgcaggagattctcatgactttccagcatgaaacgcataaagatcta

SEQ ID NO: 891298 - DNA, 75 bp, synthetic construct
  source 1..75: mol_type = other DNA
caaggtcaaggaaggtgaacttgatgctctggtcgcgacacagctaaattcgcgttacatgatcgatcattacta

SEQ ID NO: 891299 - DNA, 75 bp, synthetic construct
  source 1..75: mol_type = other DNA
acatgaaaaacagtggattaagcagcatcccaatttaaaggtgctggaaaatccttactcgcccccctattctat

SEQ ID NO: 891300 - DNA, 75 bp, synthetic construct
  source 1..75: mol_type = other DNA
aagaaatatatattaaatattggcaggttggaaaaacagaagggacaggatctactgttagccgcatggaatttg

SEQ ID NO: 891301 - DNA, 75 bp, synthetic construct
  source 1..75: mol_type = other DNA
atgaaaaagagtatctatttcattatatgtccagttctttctctatattgtggaatgacgatggctaaaacatca

SEQ ID NO: 891302 - DNA, 75 bp, synthetic construct
  source 1..75: mol_type = other DNA
gcgtaacggtaactgggtgacggagaaggatatcaccattaacggcaagactacctcgcagtacctgacgtcggt

SEQ ID NO: 891303 - DNA, 75 bp, synthetic construct
  source 1..75: mol_type = other DNA
aataacgatatttattcgtcatgccgcctgatagtacggaaaaacggtgctgaaatttataaccgtaccgcgctg

SEQ ID NO: 891304 - DNA, 75 bp, synthetic construct
  source 1..75: mol_type = other DNA
caatgccaggaggctattgatcacggttatgcacaaggtgtaggttttagcggtgtggtttcatatggtaacggt

SEQ ID NO: 891305 - DNA, 75 bp, synthetic construct
  source 1..75: mol_type = other DNA
tgtggcgcaggggaatcagctgttcatgaacgacgtgttcctgaaacgactgtttgcggtgagtatcacctcgtc

SEQ ID NO: 891306 - DNA, 75 bp, synthetic construct
  source 1..75: mol_type = other DNA
acaacagccagcttgcggatgagatggcggagatgaagaccaccatcaccgaaacccgcaatgaaatcacacaga

SEQ ID NO: 891307 - DNA, 75 bp, synthetic construct
  source 1..75: mol_type = other DNA
tctgaccgtcgatgagagcgatctttctgtgcatctggtaggacgaaaaatcaataaacgggaatgggctggcaa

SEQ ID NO: 891308 - DNA, 75 bp, synthetic construct
  source 1..75: mol_type = other DNA
tcgcaactggcgcgctttccgatcgatgccatcaaacttgaccaggtttttgttcgagatattcacaaacaacct

SEQ ID NO: 891309 - DNA, 75 bp, synthetic construct
  source 1..75: mol_type = other DNA
agatttttgtccgtgatattcacaaacagccggtttcgcaatcgctggtacgtgcgatcgttgccgtagcccagg

SEQ ID NO: 891310 - DNA, 75 bp, synthetic construct
  source 1..75: mol_type = other DNA
gtgcaaactggcagcagaagggtattttgccgaggcacgcgttattaatcagcgtctgatgccattacacaacaa

SEQ ID NO: 891311 - DNA, 75 bp, synthetic construct
  source 1..75: mol_type = other DNA
gggaccggtgctaacgctactgcggaagccattagcctgacgcagcgcttcaatgacagtggtatcgtcggctgc

SEQ ID NO: 891312 - DNA, 75 bp, synthetic construct
  source 1..75: mol_type = other DNA
catctcggcaaggaactgctggaaaactttgagctgacggaggataacgccagcaaactggaggagttttcgaaa

SEQ ID NO: 891313 - DNA, 75 bp, synthetic construct
  source 1..75: mol_type = other DNA
acccgacggtacagtatgaattctggttctcagaaaaacgcatcacggacacggcacaggtggaaacctcagccc

SEQ ID NO: 891314 - DNA, 75 bp, synthetic construct
  source 1..75: mol_type = other DNA
ccctgacggtcagggcgataaacagctacggccagcagggcgaacctgccaccaccacattccggattaatgcac

SEQ ID NO: 891315 - DNA, 75 bp, synthetic construct
  source 1..75: mol_type = other DNA
ccctgccgtcactgcgtcgtcgcctgttccgctgtgtttccatccgggaaaacacggacggcacctttgccatca

SEQ ID NO: 891316 - DNA, 75 bp, synthetic construct
  source 1..75: mol_type = other DNA
ataataatctgaacagcatgtgggctgtgaagctgcaacagatgaaggacggacgcctttatattgcgggtatcg

SEQ ID NO: 891317 - DNA, 75 bp, synthetic construct
  source 1..75: mol_type = other DNA
acttcaacgctgtcgctggctttctgctgatgtcattatggtgctggttggcctgatttgcggcatcacgctctt

SEQ ID NO: 891318 - DNA, 75 bp, synthetic construct
  source 1..75: mol_type = other DNA
ggattaccgatatcaggcaggttgaaaccacagcccgctatcttggcacggcgctgtactggatagctgccagta

SEQ ID NO: 891319 - DNA, 75 bp, synthetic construct
  source 1..75: mol_type = other DNA
gccaaccagattgaaggcgatattgttaaaaccgtggggaaggctttcccgcgggactcccgcgcaccggagcgg

SEQ ID NO: 891320 - DNA, 75 bp, synthetic construct
  source 1..75: mol_type = other DNA
attatcagataacggcggtcccgcatcttacggtgtatgacccgacggtacaatttgagttctggttttcggagg

SEQ ID NO: 891321 - DNA, 75 bp, synthetic construct
  source 1..75: mol_type = other DNA
gccctgaaggaccggcacacggcggtggaggtgaattacactgacccgcagaacggctggcagacttccactgaa

SEQ ID NO: 891322 - DNA, 75 bp, synthetic construct
  source 1..75: mol_type = other DNA
gctgtaccagccgcggtcaggcccaccgtgccggactgtgggtgataaagaccgaactgctggaaacgcagacgg

SEQ ID NO: 891323 - DNA, 75 bp, synthetic construct
  source 1..75: mol_type = other DNA
acttcaacgctgtcgctggctttccgctgatgtcattatggtgctggttggcctgatttgcggcatcacgctttt

SEQ ID NO: 891324 - DNA, 75 bp, synthetic construct
  source 1..75: mol_type = other DNA
gtgaggtgaccctgccggagacaggtacatcggcggtgaacctgattaacggcagcggtaagccggtgagcgtgg

SEQ ID NO: 891325 - DNA, 75 bp, synthetic construct
  source 1..75: mol_type = other DNA
ggttccgctacagcttcagtgccctgaaggaccggcacacggcggtggaggtgaattacactgacccgcagaacg

SEQ ID NO: 891326 - DNA, 75 bp, synthetic construct
  source 1..75: mol_type = other DNA
ctgtccgcctgctgattcagcttgagcgtaacggtaactgggtgacggagaaggatgtcaccattaacggcaaga

SEQ ID NO: 891327 - DNA, 75 bp, synthetic construct
  source 1..75: mol_type = other DNA
gcctgacctggctgaaatcaggacgtccattacggatgtcagcaatgaaatcacgcagaccgtcaataaaaaact

SEQ ID NO: 891328 - DNA, 75 bp, synthetic construct
  source 1..75: mol_type = other DNA
cacattaagccagggacagatttctggttttatgtgcgcagcgtcaacctggtgggtaaatccgtttttgttgaa

SEQ ID NO: 891329 - DNA, 75 bp, synthetic construct
  source 1..75: mol_type = other DNA
gataaacagctacggccagcagggcgaacctgccaccaccacattccggattaatgcaccggcggcaccggccag

SEQ ID NO: 891330 - DNA, 75 bp, synthetic construct
  source 1..75: mol_type = other DNA
ggtgacatcattgaaatctgtgataacgactatgccgggaccctgaccggcggacgcatcctgtccatcgatgcc

SEQ ID NO: 891331 - DNA, 75 bp, synthetic construct
  source 1..75: mol_type = other DNA
ccatgtcaccctgactttcaatgtttcttcatatggtgcaaataactggacgccaacgaccagtatcagcgacct

SEQ ID NO: 891332 - DNA, 75 bp, synthetic construct
  source 1..75: mol_type = other DNA
aaacggtgctgaaatttataaccgtaccgcgctggataatacgctgatttacagtggtgttattgatatgccagc

SEQ ID NO: 891333 - DNA, 75 bp, synthetic construct
  source 1..75: mol_type = other DNA
cagccagtggagtgtctccggcccgcacattaagccggggaaggatttctggttttatgtgcgcagcgtcaacct

SEQ ID NO: 891334 - DNA, 75 bp, synthetic construct
  source 1..75: mol_type = other DNA
gtgcattagtgtcatctccgtgcatactggagacaccagaaattaaacttcccttgctggaggataacggaaaat

SEQ ID NO: 891335 - DNA, 75 bp, synthetic construct
  source 1..75: mol_type = other DNA
ctgtgggacatgctgactcacccgcgttacggaatgggaaaacgcctggtggcggcggatgttgacaagtgggcg

SEQ ID NO: 891336 - DNA, 75 bp, synthetic construct
  source 1..75: mol_type = other DNA
cattgagctgacgccggggtattttcagataacggcggtaccggtgctggcggtgtatgacccgacggtgcagtt

SEQ ID NO: 891337 - DNA, 75 bp, synthetic construct
  source 1..75: mol_type = other DNA
cgaccggcgcgaacaaatggacgccgacaacgtacatcagcgatttactggtggtggtcatgaaaaaatccacgg

SEQ ID NO: 891338 - DNA, 75 bp, synthetic construct
  source 1..75: mol_type = other DNA
acccgcaatgaaatcacgcagacggtcaacaaaaccttggaagaccagagtgccaccatacagcagatacagcgc

SEQ ID NO: 891339 - DNA, 75 bp, synthetic construct
  source 1..75: mol_type = other DNA
attaagccggggacggatttctggttttatgtgcgcagcgtcaacctggtggggaaatctgcttttgtggaggcc

SEQ ID NO: 891340 - DNA, 75 bp, synthetic construct
  source 1..75: mol_type = other DNA
agcggtaagccggtaagtgtggacatcaccgcacaaccggcccctgaccggatacaggtcagcgccctgcctgag

SEQ ID NO: 891341 - DNA, 75 bp, synthetic construct
  source 1..75: mol_type = other DNA
gatattttatttagaatgtgggatgcatatccgaagtccggagaaagccgacagagaggcaaatgctcttgtcag

SEQ ID NO: 891342 - DNA, 75 bp, synthetic construct
  source 1..75: mol_type = other DNA
atggtaacaccacgccgttatttgtggcacagggtaatcagctgttcatgaacgatgtgttcctgaaacaacttt

SEQ ID NO: 891343 - DNA, 75 bp, synthetic construct
  source 1..75: mol_type = other DNA
ggcgatgtcattgaaatctgcgatgatgactatgcgggcatcagcaccggcgggcgcgtgctggcggtgaacagc

SEQ ID NO: 891344 - DNA, 75 bp, synthetic construct
  source 1..75: mol_type = other DNA
gtcgtattagtcacgaaggacacactttcactatttctcccgatgctcaaggaggagacgctaaatctttatacc

SEQ ID NO: 891345 - DNA, 75 bp, synthetic construct
  source 1..75: mol_type = other DNA
ttatgggatgacgcccacagagtatcaggagcgatcggcgcagggattgccgaaccgtgactcggcggcaagtat

SEQ ID NO: 891346 - DNA, 75 bp, synthetic construct
  source 1..75: mol_type = other DNA
agatcagcacaatctaacttttgacctacgacatgacgcgagaatcattgcgcgaaacgtcggatcgactgaaaa

SEQ ID NO: 891347 - DNA, 75 bp, synthetic construct
  source 1..75: mol_type = other DNA
agccaccgcaggcatcagtatcagctgaattttataaccccaatacgggcgtcagaaatgacgccttttttattg

SEQ ID NO: 891348 - DNA, 75 bp, synthetic construct
  source 1..75: mol_type = other DNA
gaggtgagcgcggctgacagccagtatctggcgctggcgaaatgggacacgccgcgggtggtgaagggcgtgcgc

SEQ ID NO: 891349 - DNA, 75 bp, synthetic construct
  source 1..75: mol_type = other DNA
gtcggccgggccagcgatgatgcggaaggttatctggaattttacaaagggctgattaataaaacacatctcggt

SEQ ID NO: 891350 - DNA, 75 bp, synthetic construct
  source 1..75: mol_type = other DNA
atatttatgaatgaagtgttcctgaaatatctgacggctcccaccattaccagcggcggtaatcctccggcattt

SEQ ID NO: 891351 - DNA, 75 bp, synthetic construct
  source 1..75: mol_type = other DNA
tgtggggctgcaggtggatgcggagcagtttggtggccagcagctgacggtgaactaccatatccgtggccgcat

SEQ ID NO: 891352 - DNA, 75 bp, synthetic construct
  source 1..75: mol_type = other DNA
tacttctgaacgtgttgcaaccgaatatgcgaacacgagtttgtacggtcatcaataataatatcgcccatgagt

SEQ ID NO: 891353 - DNA, 75 bp, synthetic construct
  source 1..75: mol_type = other DNA
ggcttcagatttttactttggcaatggcttcactgcgacacttgattttctgcttaaaccaaaaacgctacgtga

SEQ ID NO: 891354 - DNA, 75 bp, synthetic construct
  source 1..75: mol_type = other DNA
ccggacggaaagctgaccgctaaaaatgcggatatcagcggtaatgtgaatgcaaattcagggacgctcaacaac

SEQ ID NO: 891355 - DNA, 75 bp, synthetic construct
  source 1..75: mol_type = other DNA
ccgggtaactaaatttgatgggtatctgactgatgctgaacaatggcgcaaactgtcagccactgcaaacgctgc

SEQ ID NO: 891356 - DNA, 75 bp, synthetic construct
  source 1..75: mol_type = other DNA
aatgcctggctgaccacgcagcgtaaggcgtgggatgtgctcagtgatttctgctcggcgatgcgctgtatgccg

SEQ ID NO: 891357 - DNA, 75 bp, synthetic construct
  source 1..75: mol_type = other DNA
caccgtttcagcggtctgccgctgggggaatacaccctgacggtgcgggccattaacagctacggccagcagggc

SEQ ID NO: 891358 - DNA, 75 bp, synthetic construct
  source 1..75: mol_type = other DNA
caccacgccgttatttgtggcgcaggggaatcagctgttcatgaacgacgtgttcctgaagcgactgtttgcggt

SEQ ID NO: 891359 - DNA, 75 bp, synthetic construct
  source 1..75: mol_type = other DNA
accggcaaattgttattccggcggtggcattcagtggcgctaaacatgagcaagatcatactgatatctactcct

SEQ ID NO: 891360 - DNA, 75 bp, synthetic construct
  source 1..75: mol_type = other DNA
atgactatgcgggtatcagcgtcggcgggcgcgtgcttgcggtaaacagccagacccggacactgacgctcgacc

SEQ ID NO: 891361 - DNA, 75 bp, synthetic construct
  source 1..75: mol_type = other DNA
ggtgccacggttactccgaaactgaatggagtggctggcccggcattccaggttataaaagacagtctgacactg

SEQ ID NO: 891362 - DNA, 75 bp, synthetic construct
  source 1..75: mol_type = other DNA
gtatcaacgaagtctataccgcgctgaacatgattgactacggtctggataacctgccgggcggcccgctgatgg

SEQ ID NO: 891363 - DNA, 75 bp, synthetic construct
  source 1..75: mol_type = other DNA
gcgacctacgcgaactggccgaccctgcgctacatgctgcgtggcaacaccgtttctgatgcgccgctgattatc

SEQ ID NO: 891364 - DNA, 75 bp, synthetic construct
  source 1..75: mol_type = other DNA
cgcagtacagtgacgccgggtggagagagctgcagatataacgatattattccggctgaccactgcctgcatgat

SEQ ID NO: 891365 - DNA, 75 bp, synthetic construct
  source 1..75: mol_type = other DNA
cagggcggcagactgacctgtaagttccgcctgtcaggcgcactgaccaacaatcagttcgggctggggatttat

SEQ ID NO: 891366 - DNA, 75 bp, synthetic construct
  source 1..75: mol_type = other DNA
accatgctgtcgtggtggttcggcattcacccagggcgcggaggggacattcagtgcggacgcgggggccagcca

SEQ ID NO: 891367 - DNA, 75 bp, synthetic construct
  source 1..75: mol_type = other DNA
tgtcggtgctgtttggtaacgacgaacgcaaactgaatggtcattacgccgtttattacgtgctgtcgatggaga

SEQ ID NO: 891368 - DNA, 75 bp, synthetic construct
  source 1..75: mol_type = other DNA
ctctactacaagcagggtggctggctgtcggtgctgtttggtaacgacgaacgcaaactgaatggtcattacgcc

SEQ ID NO: 891369 - DNA, 75 bp, synthetic construct
  source 1..75: mol_type = other DNA
attggtcgtctggacccggaaatcgctcgcgacttcagtaacgttggcccgatggttcgcgccagcggtcacgcc

SEQ ID NO: 891370 - DNA, 75 bp, synthetic construct
  source 1..75: mol_type = other DNA
gacgttatttcgcgcctgaaagtgcgtatcaacgaagtctttacttcgctcaatatgatcgactacggcctggat

SEQ ID NO: 891371 - DNA, 75 bp, synthetic construct
  source 1..75: mol_type = other DNA
ctggaagtggaacgtctgcactcgcatctgctcaacctcggccttgcctgccactttactggctttgactccggc

SEQ ID NO: 891372 - DNA, 75 bp, synthetic construct
  source 1..75: mol_type = other DNA
ccgactaccgtctgttctacgtccatcgcggcatggaaaaactggcggaaacccgtatgggttataacgaagtga

SEQ ID NO: 891373 - DNA, 75 bp, synthetic construct
  source 1..75: mol_type = other DNA
ggtgatgtcaccacaccagtggcggtgaccggtaatgagggtaaggcggtggctgtcagtgccaccagagccccg

SEQ ID NO: 891374 - DNA, 75 bp, synthetic construct
  source 1..75: mol_type = other DNA
aaacattaggtgtgtcaatggatgctcctttgatttcaatcggcgctgtgttctttgagcctctgactggcaagt

SEQ ID NO: 891375 - DNA, 75 bp, synthetic construct
  source 1..75: mol_type = other DNA
ggttcggcattcacccagggcgcggaggggacattcagtgcggacgcgggggccagccaggattcggcgcgctgg

SEQ ID NO: 891376 - DNA, 75 bp, synthetic construct
  source 1..75: mol_type = other DNA
cgcagtacagtgacgccgggtggagagagttgtacgtataacgacatcattccggctgaccactgcctgcatgat

SEQ ID NO: 891377 - DNA, 75 bp, synthetic construct
  source 1..75: mol_type = other DNA
tttattcgcaaacaaaataccgaagctaagtatgaggctgatctcaccacaacttcaggcgaaaacctgacaatg

SEQ ID NO: 891378 - DNA, 75 bp, synthetic construct
  source 1..75: mol_type = other DNA
ctggccggtacgtgattacgtcgcaaaagcctgtgaagttggaaaatcagattgtcctgtttatcttgtacttca

SEQ ID NO: 891379 - DNA, 75 bp, synthetic construct
  source 1..75: mol_type = other DNA
tatttataactcttcatgatctttatgcaatcaaaattagtgaaaagtattcaggtggatttatcagttggatat

SEQ ID NO: 891380 - DNA, 75 bp, synthetic construct
  source 1..75: mol_type = other DNA
cctgctggcaccatgctgtcgtggtggttcggcattcacccagggcgcggaggggacattcagtgcggacacggg

SEQ ID NO: 891381 - DNA, 75 bp, synthetic construct
  source 1..75: mol_type = other DNA
gcgaccttgccggtatggcggcgcagtgtcatggtggaagcgctcaaaaagtgccgtggatttgtggtgacacca

SEQ ID NO: 891382 - DNA, 75 bp, synthetic construct
  source 1..75: mol_type = other DNA
cgttcctgatgtcgtactttacgcagaccaccgacggcaaactgaatctgatgcaccacaggaagtcaggaaaca

SEQ ID NO: 891383 - DNA, 75 bp, synthetic construct
  source 1..75: mol_type = other DNA
ggacggcggaattcagttgtcagatggtgtatttaagatcaccaagcagagcaataaaacctggtccctgacgca

SEQ ID NO: 891384 - DNA, 75 bp, synthetic construct
  source 1..75: mol_type = other DNA
tactgacctttccggatttaacgcgcagtgccatggcggcagtgctgcagttgtaccgtggatttgtggcgacac

SEQ ID NO: 891385 - DNA, 75 bp, synthetic construct
  source 1..75: mol_type = other DNA
aaactgaatggagtggctggcccggcattccaggtcataaaagacagtctgacactggggctgaatgcgctgacg

SEQ ID NO: 891386 - DNA, 75 bp, synthetic construct
  source 1..75: mol_type = other DNA
tttatgcagttcttccacgtgcgtgaaacctctatgaaaatggcggagatcctcaccggcgcgcgtaaaacctac

SEQ ID NO: 891387 - DNA, 75 bp, synthetic construct
  source 1..75: mol_type = other DNA
tcctgatgtcgtacttcactcagaccactgacggcagactgaatctgatgcatcacaggaaagccggaaacacga

SEQ ID NO: 891388 - DNA, 75 bp, synthetic construct
  source 1..75: mol_type = other DNA
atgtcgattaaacgttatgatgtggtcagggcagcctcgccgtcagatctggcggaaaaactgacacacaaactg

SEQ ID NO: 891389 - DNA, 75 bp, synthetic construct
  source 1..75: mol_type = other DNA
acgttttctttgtgccgttcctgactgatggtaacggcaacaacacgcccaccaacttaccggcagaagacccgg

SEQ ID NO: 891390 - DNA, 75 bp, synthetic construct
  source 1..75: mol_type = other DNA
ggtagaacgcaaggtcacacgcgagaaaatctccttcttaaccgaagagagtgccgttaccctcgattttcaccg

SEQ ID NO: 891391 - DNA, 75 bp, synthetic construct
  source 1..75: mol_type = other DNA
cccgttcctgatggtgtggcgatgacgggtaccggtaatccgttcctgatgtcgtacttcactcagaccactgac

SEQ ID NO: 891392 - DNA, 75 bp, synthetic construct
  source 1..75: mol_type = other DNA
agtaacgactggcagacgctggagctggtgttcaccgccagcagtgccacggttactccgaaactgaatggagtg

SEQ ID NO: 891393 - DNA, 75 bp, synthetic construct
  source 1..75: mol_type = other DNA
caggttataaaagacagtctgacactgggactgaatgcgctgacgctgacggatgttacaaaactgcagcgtatg

SEQ ID NO: 891394 - DNA, 75 bp, synthetic construct
  source 1..75: mol_type = other DNA
ttcgggctggggatttatctgtatacggatgctcccgttcctgatggtgtggcgatgacgggtaccggtaatccg

SEQ ID NO: 891395 - DNA, 75 bp, synthetic construct
  source 1..75: mol_type = other DNA
tcaccaagcagagcaataaaacctggtccctgacgcatccggtggatgacgcaattaccctgctgacacagggcg

SEQ ID NO: 891396 - DNA, 75 bp, synthetic construct
  source 1..75: mol_type = other DNA
aatacaccgacaaacaacccgtcagaagatcctgatattgccgggtctggttattacggttcggcatcccgaacg

SEQ ID NO: 891397 - DNA, 75 bp, synthetic construct
  source 1..75: mol_type = other DNA
tctaatgccatggcttacggtgaagggcttccgcttccggattcatacgatgcgccccatccgcgcattaagcaa

SEQ ID NO: 891398 - DNA, 75 bp, synthetic construct
  source 1..75: mol_type = other DNA
caggaaacacaaagttgggcgagttcgggaattacagtaatgactggcagacgctggaactggtgttcaccgccg

SEQ ID NO: 891399 - DNA, 75 bp, synthetic construct
  source 1..75: mol_type = other DNA
cccgatccacatcattacgccgtcggcgttaaagaagtcattggtctcacgccacagcaaatcaacgatcgtttt

SEQ ID NO: 891400 - DNA, 75 bp, synthetic construct
  source 1..75: mol_type = other DNA
agccatgctgacacagtttcgtgctgacctctccgtgtttaacgcgcagtgccatggtggcagtgctgcagatgt

SEQ ID NO: 891401 - DNA, 75 bp, synthetic construct
  source 1..75: mol_type = other DNA
gctggcccggcattccaggccataaaagacagtctggcagtgggactaaatgcactgacgctgacggatattacc

SEQ ID NO: 891402 - DNA, 75 bp, synthetic construct
  source 1..75: mol_type = other DNA
atttcagttcatgggcgcgcagggagcattattccggatcgtttggcaaccgctattctgaacgcagccgggcgc

SEQ ID NO: 891403 - DNA, 75 bp, synthetic construct
  source 1..75: mol_type = other DNA
aacctgccgggtggcccgctgatggtggaaggctttacctacattccgcaccgctttgcgctgggctttgccgaa

SEQ ID NO: 891404 - DNA, 75 bp, synthetic construct
  source 1..75: mol_type = other DNA
tggtggatgtgctgctgagcacaccgaacatggaacagcgcaccgtcggcattggtcgtctggacccggaaatcg

SEQ ID NO: 891405 - DNA, 75 bp, synthetic construct
  source 1..75: mol_type = other DNA
agccgccttaaccatccgaaagcggacctgtcaaaggggcagtacggaaccgtggggcaggggctgcatatcgcc

SEQ ID NO: 891406 - DNA, 75 bp, synthetic construct
  source 1..75: mol_type = other DNA
gatatgcggggacacgacgtatttctggaagcagaagaacgaatccacgtaccagacggtgtacggcagttataa

SEQ ID NO: 891407 - DNA, 75 bp, synthetic construct
  source 1..75: mol_type = other DNA
ggtgacaccgggtggtgcagcatgcagatataacgacatcattccggcggaccattgtctgcatgatgtgcagga

SEQ ID NO: 891408 - DNA, 75 bp, synthetic construct
  source 1..75: mol_type = other DNA
taaaaacatgaccggcgggcgtctttatgcccacacacttgaagcaatcattccaggctttgcagcatcagcgcc

SEQ ID NO: 891409 - DNA, 75 bp, synthetic construct
  source 1..75: mol_type = other DNA
atttcagttcatgggcgcgcaggtagcattattccggatcgtatggcaaccgctattctgaacgcagccgggcgc

SEQ ID NO: 891410 - DNA, 75 bp, synthetic construct
  source 1..75: mol_type = other DNA
tgcggcatcgagaacgaatggaaaccaggtatcatcaaaccgcccgacacatttcagttcatgggcgcgcaggca

SEQ ID NO: 891411 - DNA, 75 bp, synthetic construct
  source 1..75: mol_type = other DNA
ggatgttacaaaaaatgcagcgtatggcgttgagatagaaagtctggtgctggagataaatacacctacatcatg

SEQ ID NO: 891412 - DNA, 75 bp, synthetic construct
  source 1..75: mol_type = other DNA
taacctttataatcttccttttacggttctttgtgaggtacataagaactggtataaaacgccaaatgcagcgcc

SEQ ID NO: 891413 - DNA, 75 bp, synthetic construct
  source 1..75: mol_type = other DNA
tgtccacccctcaggttgaaaatggcccttgcgcatcatcttttattatatcagaaacgacggcagcgacccgcg

SEQ ID NO: 891414 - DNA, 75 bp, synthetic construct
  source 1..75: mol_type = other DNA
cggtttgataaatatgacggtagcacaacaacttttcttggtgatgcgtatattgatacacaaacgcttgaaatt

SEQ ID NO: 891415 - DNA, 75 bp, synthetic construct
  source 1..75: mol_type = other DNA
ataacaggatttaaaacaaaagacgacgcttttgtttttgcattcagaaatacagcaggtagtgtaggaactcca

SEQ ID NO: 891416 - DNA, 75 bp, synthetic construct
  source 1..75: mol_type = other DNA
gaaccgcgatttgaacgagaaggtttgctgattgaaggacaaagaaccaactatcatcttaattcacttacgcca

SEQ ID NO: 891417 - DNA, 75 bp, synthetic construct
  source 1..75: mol_type = other DNA
catgacggaagatgatgtcatgccggaggcattgcgtcgttttgaggcaatggtggaagaagcagcacgcaacgc

SEQ ID NO: 891418 - DNA, 75 bp, synthetic construct
  source 1..75: mol_type = other DNA
aacagccaggttgcagcagcccaaagcgagagcgcggcagccggttctgcgacttcagcagctggatcagcaact

SEQ ID NO: 891419 - DNA, 75 bp, synthetic construct
  source 1..75: mol_type = other DNA
ctgattgggcaaacctcagccattaatatggcatcaattgctgcaacaaagtcagttgatgtctcaggcgataat

SEQ ID NO: 891420 - DNA, 75 bp, synthetic construct
  source 1..75: mol_type = other DNA
cggcagcgaagaccagcgaaacgaatgccaaagccagtgaaactgcggcgaaaagcagtcaggatgcagcagctg

SEQ ID NO: 891421 - DNA, 75 bp, synthetic construct
  source 1..75: mol_type = other DNA
agggccgacatcaatagttcttcctggatcggcatatgttagtgttggttccccgtcaagaggaactggtaacaa

SEQ ID NO: 891422 - DNA, 75 bp, synthetic construct
  source 1..75: mol_type = other DNA
tcagtacagtaaaggtccgtatgttaccgcgtcgttcagggtaagaagtgatctcaatgttcgcgcacgtatccg

SEQ ID NO: 891423 - DNA, 75 bp, synthetic construct
  source 1..75: mol_type = other DNA
aacgcgaaaaatagcgagacagccgcaacgacaagcgaaaccaacgcaaagtccagccagacggcagcgaaaacc

SEQ ID NO: 891424 - DNA, 75 bp, synthetic construct
  source 1..75: mol_type = other DNA
aaagattatcgctgtatatagaataaaaagcgatggcaagtttcaggctggctgcaatggggttttatcaacacc

SEQ ID NO: 891425 - DNA, 75 bp, synthetic construct
  source 1..75: mol_type = other DNA
ctacttctgccacggcatcagccaacagtcaaagagctgcaaaaaccagtgaaaccaacgcaaagacaagcgaga

SEQ ID NO: 891426 - DNA, 75 bp, synthetic construct
  source 1..75: mol_type = other DNA
tgcaaaggctgtaaaagatgaggctactggttggattttctatcaggctacaattactgcactagatacagagag

SEQ ID NO: 891427 - DNA, 75 bp, synthetic construct
  source 1..75: mol_type = other DNA
gcagcggcgaactcagcgaaagcatcggcagcaagccagacggcagctaaagcaagcgaagatgcagccagagag

SEQ ID NO: 891428 - DNA, 75 bp, synthetic construct
  source 1..75: mol_type = other DNA
ggacggatagttttggttttacttatggaaagtttgtctgcaacgattctctggttgggcaaacttcggctatta

SEQ ID NO: 891429 - DNA, 75 bp, synthetic construct
  source 1..75: mol_type = other DNA
gtccagccagacggcagcgaaaaccagcgaaacgaatgccaaagccagtgaaactgcggcgaaaagcagccaggc

SEQ ID NO: 891430 - DNA, 75 bp, synthetic construct
  source 1..75: mol_type = other DNA
ctcgcgcaagcgatatggtgacagtcccaatcaagaataacctttataatcttccttttacggttctttgtgagg

SEQ ID NO: 891431 - DNA, 75 bp, synthetic construct
  source 1..75: mol_type = other DNA
gataccgtttaacgattcactggatatgattacggggttttcgccgtcatataaaaagattgttattggtgatga

SEQ ID NO: 891432 - DNA, 75 bp, synthetic construct
  source 1..75: mol_type = other DNA
atcttttattatatcaggaacgacggcggcgactcgtgcgagtgatatggttacgatcccgaccgaaaacaacat

SEQ ID NO: 891433 - DNA, 75 bp, synthetic construct
  source 1..75: mol_type = other DNA
tgccatgacggaagatgatgtcatgccggaggcattgcgccgttttgaggaaatggtggaagaagcggcacgcaa

SEQ ID NO: 891434 - DNA, 75 bp, synthetic construct
  source 1..75: mol_type = other DNA
tttattatggggtttggttcttctggaactatcagtcaggatggttattcgtattgcgatataggcggggctaac

SEQ ID NO: 891435 - DNA, 75 bp, synthetic construct
  source 1..75: mol_type = other DNA
aaagctgcaaaaaccagtgaaactaacgcaaagacgagtgaaacaaaagcagcagccagcgagacagaagcaacg

SEQ ID NO: 891436 - DNA, 75 bp, synthetic construct
  source 1..75: mol_type = other DNA
ttaacagcaaactttgaaatcgaccctggtagtggatggatatattttcaggcaacactgaaatgtctgccagaa

SEQ ID NO: 891437 - DNA, 75 bp, synthetic construct
  source 1..75: mol_type = other DNA
aattactggtggcaatgcccagctattaacagcaaactttgaaatcgaccctggtagtggatggatatattttca

SEQ ID NO: 891438 - DNA, 75 bp, synthetic construct
  source 1..75: mol_type = other DNA
aacctcatgtcgttttaaaacagaactgcaggtaaggttgcgtatccggtttgataaatatgacggtagcgcaac

SEQ ID NO: 891439 - DNA, 75 bp, synthetic construct
  source 1..75: mol_type = other DNA
aagctacgggctggatttttgtagaggcaacgattcaagcaagtaaagaaacttacataacctctgcaatacaat

SEQ ID NO: 891440 - DNA, 75 bp, synthetic construct
  source 1..75: mol_type = other DNA
catgacggaggatgatgcccgtccggaggcattgcgtcgttttgaggcaatggtggaagaagtggcacgcaacgc

SEQ ID NO: 891441 - DNA, 75 bp, synthetic construct
  source 1..75: mol_type = other DNA
tgctgaaagatggtgcgggaaaaccaatacagaactgcactattcaactgaaggcaaagcgtaacagcaccactg

SEQ ID NO: 891442 - DNA, 75 bp, synthetic construct
  source 1..75: mol_type = other DNA
agatattacggtcagctttatatgcaaacttataaagcgtcgacaagtagttacgtttctagtttgtttactggt

SEQ ID NO: 891443 - DNA, 75 bp, synthetic construct
  source 1..75: mol_type = other DNA
tattctcctaagcagagcggggcaaccgtatctggtgactatatttatctggccaccccacaagtagaagatggg

SEQ ID NO: 891444 - DNA, 75 bp, synthetic construct
  source 1..75: mol_type = other DNA
catggctggaaagtagtgaaggttgcaatgggcgcagagaagttctggatgcaaaagcatgtcttgcagatatct

SEQ ID NO: 891445 - DNA, 75 bp, synthetic construct
  source 1..75: mol_type = other DNA
attagtctcgtctgcaatgacaattcacggcgacatacatcccgaacgctataccttctttctgactcaggaagg

SEQ ID NO: 891446 - DNA, 75 bp, synthetic construct
  source 1..75: mol_type = other DNA
taccatttctgtcaaagaggggggcattattactgatatccgcaaacagggccaatggctccctaatggctacaa

SEQ ID NO: 891447 - DNA, 75 bp, synthetic construct
  source 1..75: mol_type = other DNA
aaaccgggacggatagttttggttttacctatggaaagtttgtctgtaacgattctctgattgggcaaacctcag

SEQ ID NO: 891448 - DNA, 75 bp, synthetic construct
  source 1..75: mol_type = other DNA
ttatccggcgtttggcggaagcttggaaagtgagctcatctgatgcgattgcgttgttacgacaggcggcctgga

SEQ ID NO: 891449 - DNA, 75 bp, synthetic construct
  source 1..75: mol_type = other DNA
gaataagagctttgcggtttacaacaacggcaaggccggtgttgcgatcatccttagtgagcgaggaaaccagct

SEQ ID NO: 891450 - DNA, 75 bp, synthetic construct
  source 1..75: mol_type = other DNA
tcttggcattggcccggcgattcagatggcggggccggctgtattgctgggctacggcgtcgccgggatcatcgc

SEQ ID NO: 891451 - DNA, 75 bp, synthetic construct
  source 1..75: mol_type = other DNA
tctctgcatacattgcaacgttatactgccggtaatattaatatcggtggacaatcatccagtggcaacagacac

SEQ ID NO: 891452 - DNA, 75 bp, synthetic construct
  source 1..75: mol_type = other DNA
tgcgcttgtcggcaattttgctgccggtgtggattgtattcctgtttgtggcgtttaaaacgctgcgtcggaaat

SEQ ID NO: 891453 - DNA, 75 bp, synthetic construct
  source 1..75: mol_type = other DNA
ttctgcaagcgcggcggctgcttctgccactgcatcagctaacagtcaaaaagcagcaaaaaccagtgaaaccaa

SEQ ID NO: 891454 - DNA, 75 bp, synthetic construct
  source 1..75: mol_type = other DNA
actgcggcgaaaaatagccaggctgcagcagctgaaagcgagagcgcagcagccggttctgcgacttcagcagct

SEQ ID NO: 891455 - DNA, 75 bp, synthetic construct
  source 1..75: mol_type = other DNA
aacgccaaatgcagcaccgcgtgtttttgacacataccggcatcaggcagatgcggggatcgtaatggggtttgg

SEQ ID NO: 891456 - DNA, 75 bp, synthetic construct
  source 1..75: mol_type = other DNA
ctgcaagccagacagcggctaaagcaagtgaagatgcagccagggagtacgcaagccaggcagctgagccgtata

SEQ ID NO: 891457 - DNA, 75 bp, synthetic construct
  source 1..75: mol_type = other DNA
ccggcacgctgaatgattttctcggcgccatgacggaagaagatgtcatgccggaggcattgcgtcgttttgagg

SEQ ID NO: 891458 - DNA, 75 bp, synthetic construct
  source 1..75: mol_type = other DNA
ctggcacgctgaatgattttctcggtgccatgacggaagacgatgtcatgccggaggcattgcgtcgttttgagg

SEQ ID NO: 891459 - DNA, 75 bp, synthetic construct
  source 1..75: mol_type = other DNA
caggcacgctgaatgattttctcggggccatgacggaagacgatgtcatgccggaggcattgcgtcgttttgagg

SEQ ID NO: 891460 - DNA, 75 bp, synthetic construct
  source 1..75: mol_type = other DNA
ctgcagcggcatcatcgaagaacgcggcgaaaacctcagaaacgaatgcagctaatagtgcacaggcggcagcga

SEQ ID NO: 891461 - DNA, 75 bp, synthetic construct
  source 1..75: mol_type = other DNA
ctacttacacttttttgggagatgcttacctcaatttatcaacacttgtaattgataaaactggtggtgcagcaa

SEQ ID NO: 891462 - DNA, 75 bp, synthetic construct
  source 1..75: mol_type = other DNA
cgggcacgctgaatgattttctcggagccatgacggaagacgatgtcatgccggaggcattgcgtcgttttgagg

SEQ ID NO: 891463 - DNA, 75 bp, synthetic construct
  source 1..75: mol_type = other DNA
gtggaatccggactgctttttgcagatcctgccgtagtggatcgtgaaactgacgaacttatagaaaaagcaatt

SEQ ID NO: 891464 - DNA, 75 bp, synthetic construct
  source 1..75: mol_type = other DNA
aatatcaatattactttgcagataaacaaatatctgccaggggttcgtatgagtatcgatgcactacgatgggct

SEQ ID NO: 891465 - DNA, 75 bp, synthetic construct
  source 1..75: mol_type = other DNA
tatcgtgaaaggcagcattatggcgaaagcctgggaagcgggacgtttgaacggtattgaactggacgattacac

SEQ ID NO: 891466 - DNA, 75 bp, synthetic construct
  source 1..75: mol_type = other DNA
ggtggagtttactggtaaggttgagtgtattgcgagagtacatcaatttgggttggctgataagcctagttacaa

SEQ ID NO: 891467 - DNA, 75 bp, synthetic construct
  source 1..75: mol_type = other DNA
catcgatgttcagcgtgtcacgcttgatgatggcggggttgatcagcgtgcgcttggcgttaaccgggtgaagat

SEQ ID NO: 891468 - DNA, 75 bp, synthetic construct
  source 1..75: mol_type = other DNA
cggttgatcagcgagcacttggcgttaatcgagtgaagatattcgaacgctggaaggctatcgacaccagggata

SEQ ID NO: 891469 - DNA, 75 bp, synthetic construct
  source 1..75: mol_type = other DNA
gcctcgtttgccgacgaagaacagcaacatcgttctattgccgaacaactggcgcatcaggcaaatttagttaat

SEQ ID NO: 891470 - DNA, 75 bp, synthetic construct
  source 1..75: mol_type = other DNA
gcaggctgaatgtttgcaaacgctggagcgagtggttgaaaccggcgtggacggcataaagctgcatccgctgca

SEQ ID NO: 891471 - DNA, 75 bp, synthetic construct
  source 1..75: mol_type = other DNA
tgaagttcaggtactgcgctctatgtatcaacaggcggtgagccaggccaacattgtcggtttgtgcgtcggtac

SEQ ID NO: 891472 - DNA, 75 bp, synthetic construct
  source 1..75: mol_type = other DNA
gacaaaacgctgcatcgcatcaatcgcggacatgattttgcctgctatcagcgcacgacccagctggcgcgtcag

SEQ ID NO: 891473 - DNA, 75 bp, synthetic construct
  source 1..75: mol_type = other DNA
gcgcccggactgcgtgccggatgcggtgttggatctgctttgtgaatataaagaccagggctacgaagtgtggct

SEQ ID NO: 891474 - DNA, 75 bp, synthetic construct
  source 1..75: mol_type = other DNA
gacaaaacgctacatcgcatcaatcgcggtcatgattttgcctgttatcagcgcacgacgcagctggcgcgtgag

SEQ ID NO: 891475 - DNA, 75 bp, synthetic construct
  source 1..75: mol_type = other DNA
gcgcgtcccctgctcggctttaccggtgaggatgtgcagatgattgaagagattatcctggctcaccttgagcgt

SEQ ID NO: 891476 - DNA, 75 bp, synthetic construct
  source 1..75: mol_type = other DNA
agatactaagtactggtgatgaaggcacaacagatgctctcataaaaacaaagatccttcttttctctatcggga

SEQ ID NO: 891477 - DNA, 75 bp, synthetic construct
  source 1..75: mol_type = other DNA
ggatggttgggtgctggttcctaaggagccaactccagaaatgcgtgaggcgtaccatcaggcgcaggaagagtg

SEQ ID NO: 891478 - DNA, 75 bp, synthetic construct
  source 1..75: mol_type = other DNA
cccatccagtggtgttgatgcttgcagaaaaaggaatgaacatcacagtagatcatgctgactacgtgtggtttg

SEQ ID NO: 891479 - DNA, 75 bp, synthetic construct
  source 1..75: mol_type = other DNA
aaaaattatttagtttctcttttttggcgattcaggaatttatgcgttttgctaccgtaagctgttcaatctccg

SEQ ID NO: 891480 - DNA, 75 bp, synthetic construct
  source 1..75: mol_type = other DNA
tcagtttcccttccagattatagaattgttggcacaagaattcttgcagatctgaacaacggcgttcgcctatat

SEQ ID NO: 891481 - DNA, 75 bp, synthetic construct
  source 1..75: mol_type = other DNA
tgctacaaccagtaaagttagactttcaatcagtcaaatcgaagacctagtaaccaatgctggtgatagccatac

SEQ ID NO: 891482 - DNA, 75 bp, synthetic construct
  source 1..75: mol_type = other DNA
gggaccgggtttagccatacttccggctggtgcgggaaaaccatctcggcgctgattgctgaaattattccggac

SEQ ID NO: 891483 - DNA, 75 bp, synthetic construct
  source 1..75: mol_type = other DNA
ctaatggtgttgcggccttcacggtactgatggggtatataccattcagttctgccagttacggcatccccggtc

SEQ ID NO: 891484 - DNA, 75 bp, synthetic construct
  source 1..75: mol_type = other DNA
tctgaaacgcttgctgcaacagcaaaagcggcagcgatgaattatgcggatattgtagctctgcaaggcaagact

SEQ ID NO: 891485 - DNA, 75 bp, synthetic construct
  source 1..75: mol_type = other DNA
gacggggatgtgttattcagtcggcagtgctacgcgccaggggagcagttcgccgacccggtttatcgaccagtc

SEQ ID NO: 891486 - DNA, 75 bp, synthetic construct
  source 1..75: mol_type = other DNA
cgtcgtttcggaggaaaactgcacgcacgtaatgacggtattgcctcctttgtccgctcagtccggcagggatac

SEQ ID NO: 891487 - DNA, 75 bp, synthetic construct
  source 1..75: mol_type = other DNA
tgaacattttgtgctgaatgcaacggaggaggaagcgcggcgcgggcttactagagtgatggcggaatttggcga

SEQ ID NO: 891488 - DNA, 75 bp, synthetic construct
  source 1..75: mol_type = other DNA
atggtgcgatagcttccatattcacttatgccgggggtattgttgctcttttgctatgtactatcgtttattttt

SEQ ID NO: 891489 - DNA, 75 bp, synthetic construct
  source 1..75: mol_type = other DNA
gttctggcgaagatatcgtaaccattacgtctgcgcagggagtgaacctgatcgacgttgcgaaagagttggtgc

SEQ ID NO: 891490 - DNA, 75 bp, synthetic construct
  source 1..75: mol_type = other DNA
ttatagtgttcgatttaatgaaaaactagtccatcacccttattatgattcttgggcttttggcccatatattcg

SEQ ID NO: 891491 - DNA, 75 bp, synthetic construct
  source 1..75: mol_type = other DNA
cttaatgcctgcattaatagcaaatagctcagtgactcgctctctaatgtcattatttggttccaaaaaaatttc

SEQ ID NO: 891492 - DNA, 75 bp, synthetic construct
  source 1..75: mol_type = other DNA
tgatgccgcagacaaaaccggtgtttgggaatccgaagaccaggaaaaggccacggtagatcaaacgggtctggt

SEQ ID NO: 891493 - DNA, 75 bp, synthetic construct
  source 1..75: mol_type = other DNA
tatttcagattgcaattgatacagttacaaagtttcaggaaaggggggggatgcggttaggtttaatccattata

SEQ ID NO: 891494 - DNA, 75 bp, synthetic construct
  source 1..75: mol_type = other DNA
gtacatatatagacttcgttgaaccattcactggagaagcaagtcgttatgagaattacttagaatcggcttctt

SEQ ID NO: 891495 - DNA, 75 bp, synthetic construct
  source 1..75: mol_type = other DNA
aactcagtgcacagcaaattcagactcccggcgaaaccactaaccagctgggatgggccgctatccgcaaatgtg

SEQ ID NO: 891496 - DNA, 75 bp, synthetic construct
  source 1..75: mol_type = other DNA
tacgagcgctgattgaaccccagacattgcgccgaaccaaagaagaggttgcgcgtgatttaccacagaaaattg

SEQ ID NO: 891497 - DNA, 75 bp, synthetic construct
  source 1..75: mol_type = other DNA
gtaccggtgccattttaacgcatgataatcagcaatacctgttatcgcgggaaaactgggcgctcttacaggcaa

SEQ ID NO: 891498 - DNA, 75 bp, synthetic construct
  source 1..75: mol_type = other DNA
ccctacagttggatcgctggctaatcgtaaaaagccgtgagagttggttatcattctttcaacgtaaggggattg

SEQ ID NO: 891499 - DNA, 75 bp, synthetic construct
  source 1..75: mol_type = other DNA
tacggggaaattacccggttctctttcctacacgaatattgttggcaatatgatgtttggcgctatttccgggtc

SEQ ID NO: 891500 - DNA, 75 bp, synthetic construct
  source 1..75: mol_type = other DNA
gcaaattctgagcttcctggtatggttcattgaaaaattcccgcaagaaccgccaagtctcattgttgcacctgt

SEQ ID NO: 891501 - DNA, 75 bp, synthetic construct
  source 1..75: mol_type = other DNA
gatgatgaaggcgttctgggcaaaatgagcggtcccaaaccggtaaaaactgtgtcgatcacaccggaatctcca

SEQ ID NO: 891502 - DNA, 75 bp, synthetic construct
  source 1..75: mol_type = other DNA
gcagggatgctacctcaagaagtgtggctgaaccgcctgatcgctatggaagaaaccctgccacgagggaagttt

SEQ ID NO: 891503 - DNA, 75 bp, synthetic construct
  source 1..75: mol_type = other DNA
gcggcggcctcttatagctgccactcaatgaatggcctcttcccccatatcaaccctgcgaactgtttgtttatc

SEQ ID NO: 891504 - DNA, 75 bp, synthetic construct
  source 1..75: mol_type = other DNA
tgagtgttgcgaaggggaaatcactatcgataagtttatggattatctttcctctttgcccagtattaatgctgt

SEQ ID NO: 891505 - DNA, 75 bp, synthetic construct
  source 1..75: mol_type = other DNA
tgatgggctgaaggaaacatttgcaggaggtgatccttggaaatgggttgacgagctttgggagaaagttcagca

SEQ ID NO: 891506 - DNA, 75 bp, synthetic construct
  source 1..75: mol_type = other DNA
ctggccggacagggcgttaatcttggtgctaaaaagcttcgtcaggctgctattgagagagcaaagaaaatgtat

SEQ ID NO: 891507 - DNA, 75 bp, synthetic construct
  source 1..75: mol_type = other DNA
ctggccggacagggcgttaatcttggtgccaaaaaacttcgtcaggcagctattgagagagcaaagaaaatgtat

SEQ ID NO: 891508 - DNA, 75 bp, synthetic construct
  source 1..75: mol_type = other DNA
ataaagttaacaagttaacaaataaaggtgttcatgccgagttaaatcggattgaagctgtaaagtcagtatttc

SEQ ID NO: 891509 - DNA, 75 bp, synthetic construct
  source 1..75: mol_type = other DNA
ctgtccgagctggtgcagggtcgtaacattaccattactgcgccgctggccgagtctgtgttgaaaaatatggtc

SEQ ID NO: 891510 - DNA, 75 bp, synthetic construct
  source 1..75: mol_type = other DNA
atgtccaatacccatgtaaaaaacatcaaacttggcgcctgcaaagtgtcgtttggtggtgttgatctgggttac

SEQ ID NO: 891511 - DNA, 75 bp, synthetic construct
  source 1..75: mol_type = other DNA
tgcgattgcgtgattctcctggatgattgtttgatttttacagaactaaaatcaaatggtcaaccaatatattat

SEQ ID NO: 891512 - DNA, 75 bp, synthetic construct
  source 1..75: mol_type = other DNA
ttttgtgagatgtttttatcatcattatcatccttggttgtggtcaatgatcctaaaaaaatgaagaggattttt

SEQ ID NO: 891513 - DNA, 75 bp, synthetic construct
  source 1..75: mol_type = other DNA
atcactgtctctaagcctgatatcaataaagctactttagatgaactggaggcgttgttaaatataaatagagca

SEQ ID NO: 891514 - DNA, 75 bp, synthetic construct
  source 1..75: mol_type = other DNA
acatttcagttcatgggcgcgcaggggcattatttcggatcgcctggcaaccgctattctgaacgcagttggtcg

SEQ ID NO: 891515 - DNA, 75 bp, synthetic construct
  source 1..75: mol_type = other DNA
ggatattaccaaaaatgcaacgtatggcgtcgatatcggcagcctggtgctggaaatcaataatcccgcagcata

SEQ ID NO: 891516 - DNA, 75 bp, synthetic construct
  source 1..75: mol_type = other DNA
cgcagtacagtgacgccgggtggggctgcctgcagatataacgatattattccggccgaccactgcctgcatgat

SEQ ID NO: 891517 - DNA, 75 bp, synthetic construct
  source 1..75: mol_type = other DNA
cgggtaccggtaatccgttcctgatgtcgtacttcactcagaccactgacggcagagtgaatctgatgcatcaca

SEQ ID NO: 891518 - DNA, 75 bp, synthetic construct
  source 1..75: mol_type = other DNA
acctgtaagttccgcctgtcaggcgcactgaccaacaatcagttcgggctggggatttatctgtatacggatgct

SEQ ID NO: 891519 - DNA, 75 bp, synthetic construct
  source 1..75: mol_type = other DNA
aagattccgcgtcggatcaagaaccgacacttcatcggggattacataaccgtcatattcagttgattgcgctgg

SEQ ID NO: 891520 - DNA, 75 bp, synthetic construct
  source 1..75: mol_type = other DNA
ttatctcgcacgaccgttggttcctcgaccgtatcgccacgcacatcctggactaccaggatgaaggtaaagttg

SEQ ID NO: 891521 - DNA, 75 bp, synthetic construct
  source 1..75: mol_type = other DNA
tatgatctctggtcaggaacaaccagacagcggcaccatcactttaggtgaaacggtgaaactggcatctgtcga

SEQ ID NO: 891522 - DNA, 75 bp, synthetic construct
  source 1..75: mol_type = other DNA
gctcgacgaaccaactaacgacctggatatcgaaaccctgcgcgcactggaaaacgccctgctggagttccctgg

SEQ ID NO: 891523 - DNA, 75 bp, synthetic construct
  source 1..75: mol_type = other DNA
ctgcgcgatggttatctcgcacgaccgctggttcctcgaccgtatcgccacgcacattctggattaccaggatga

SEQ ID NO: 891524 - DNA, 75 bp, synthetic construct
  source 1..75: mol_type = other DNA
atcgtcgggatcatcgggccgaacggcgcgggtaaatcgacactgttccgtatgatctccggtcaggaacagccg

SEQ ID NO: 891525 - DNA, 75 bp, synthetic construct
  source 1..75: mol_type = other DNA
cgttggttcctcgaccgtatcgccacacacattctggattaccaggatgaaggtaaagttgagttctttgaaggt

SEQ ID NO: 891526 - DNA, 75 bp, synthetic construct
  source 1..75: mol_type = other DNA
taccggtaatccgttcctgatgtcgtacttcactcagaccactgacggcagagtgaatctgatgcatcacaggaa

SEQ ID NO: 891527 - DNA, 75 bp, synthetic construct
  source 1..75: mol_type = other DNA
gcggtatgaatgattatttgccagtggaaaccgctgtatggcaacgcgttgagcgcataattaaaagcgtcgttg

SEQ ID NO: 891528 - DNA, 75 bp, synthetic construct
  source 1..75: mol_type = other DNA
tatccgtgcggatctgaacgtaccagtaaaagacgggaaagtaaccagcgacgcgcgcatccgtgcttctctgcc

SEQ ID NO: 891529 - DNA, 75 bp, synthetic construct
  source 1..75: mol_type = other DNA
cgttctccatcgctggcggcggcgacactctggcagcaatcgacctgttcggtattgctgacaaaatctcctaca

SEQ ID NO: 891530 - DNA, 75 bp, synthetic construct
  source 1..75: mol_type = other DNA
gtggcaaaaaacattcaagccattcgcgtgaacgattacctgcctggcgaaacggccatctggcagcgcattgaa

SEQ ID NO: 891531 - DNA, 75 bp, synthetic construct
  source 1..75: mol_type = other DNA
caggcggtcgttatgacggtctggtggaacaactgggcggacgcgcaacaccggcagtgggttttgcaatgggcc

SEQ ID NO: 891532 - DNA, 75 bp, synthetic construct
  source 1..75: mol_type = other DNA
aattaccgcgatgcgctggttgctttcctcgaacagcataaagaaaagctggacgaagactgcaaacgccgcatg

SEQ ID NO: 891533 - DNA, 75 bp, synthetic construct
  source 1..75: mol_type = other DNA
gctaacgctatcgccgacagcgaagcgttctccatcgctggcggcggcgacactctggcagcaatcgacctgttc

SEQ ID NO: 891534 - DNA, 75 bp, synthetic construct
  source 1..75: mol_type = other DNA
cagcagtgccacggttactccgaaactgaatggagtggctggcccggcattccaggtcataaaagacagtctgac

SEQ ID NO: 891535 - DNA, 75 bp, synthetic construct
  source 1..75: mol_type = other DNA
gaccaacaatcagttcggtctgggaatttatctgtataccgatgtagcgttacctgacgtcgtggcgatgaccgg

SEQ ID NO: 891536 - DNA, 75 bp, synthetic construct
  source 1..75: mol_type = other DNA
ctggcccggcattccaggttataaaagacagtctgacactgggactgaatgcgctgacgctgacggatgttacaa

SEQ ID NO: 891537 - DNA, 75 bp, synthetic construct
  source 1..75: mol_type = other DNA
cggttggtgtgttcgaattcccgaacttccgtaaagggactgaaattgtggctaacgctatcgcagacagcgaag

SEQ ID NO: 891538 - DNA, 75 bp, synthetic construct
  source 1..75: mol_type = other DNA
ggaactggctgaaatcctgaagaatgcgaaaactattctgtggaacggtccggttggcgtgttcgaattcccgaa

SEQ ID NO: 891539 - DNA, 75 bp, synthetic construct
  source 1..75: mol_type = other DNA
ctgaaacgcctggatgaagtgtatgcgctgtacgccgatccggatgccgattttgacaagctggccgctgaacaa

SEQ ID NO: 891540 - DNA, 75 bp, synthetic construct
  source 1..75: mol_type = other DNA
ataaccccttataccctgatgcaggcgattgcagcagaaggtgatgtggtggtcagtggtgcaactgagccggag

SEQ ID NO: 891541 - DNA, 75 bp, synthetic construct
  source 1..75: mol_type = other DNA
ccatttggcagccctgtcgccatcacgccttataccctgatgcaggccattgcggcggaaggtgatgtcaccaca

SEQ ID NO: 891542 - DNA, 75 bp, synthetic construct
  source 1..75: mol_type = other DNA
atcggctggagaatacgcctcaagaagaaaatgtttcagtgagttcggattacatctctgaatacctgaaacagg

SEQ ID NO: 891543 - DNA, 75 bp, synthetic construct
  source 1..75: mol_type = other DNA
tgaagaatttcaattatcatatccctcaattataaatatacttccaagcgtcaataagtttggggggcaggtaaa

SEQ ID NO: 891544 - DNA, 75 bp, synthetic construct
  source 1..75: mol_type = other DNA
cctcagccttcatcagtggtaaggcaccggaaatcaaaccctcgtccggcggcaacacgccatcgggtccgtttg

SEQ ID NO: 891545 - DNA, 75 bp, synthetic construct
  source 1..75: mol_type = other DNA
tacttctgacaggaacctgctggtatgagttgacagggctatggagtctgttatcagactgtgagtacgacgttt

SEQ ID NO: 891546 - DNA, 75 bp, synthetic construct
  source 1..75: mol_type = other DNA
atgaaccaactgcaagaaatcattcagatactaagtactggtgacgaaggcacaacagatgctctcataaaaaca

SEQ ID NO: 891547 - DNA, 75 bp, synthetic construct
  source 1..75: mol_type = other DNA
ttatccgctggagccgattgctgttgataaaaacttccgtggtaagccagagcagaacccgcagcagtgcatcgg

SEQ ID NO: 891548 - DNA, 75 bp, synthetic construct
  source 1..75: mol_type = other DNA
atttcgttgtttatcttctcagaagtcacaaaagtgacaacgattatctggtgtaaacgacaggggaaagtgtga

SEQ ID NO: 891549 - DNA, 75 bp, synthetic construct
  source 1..75: mol_type = other DNA
tttatggggaaaaacggtgtgaaaggtgaagtcgtgatgcgtaacggaaaaatcctcggctgggcgtggggagct

SEQ ID NO: 891550 - DNA, 75 bp, synthetic construct
  source 1..75: mol_type = other DNA
acgctccagttattcttcatcgtgaccagcatcactggctggatccactggctgaaaggtcagggtggcgacatc

SEQ ID NO: 891551 - DNA, 75 bp, synthetic construct
  source 1..75: mol_type = other DNA
ctgtatatgacgcgcggtttaaacctgaccgctggcttatatttcctgttctggattaacgcctggcatggtttg

SEQ ID NO: 891552 - DNA, 75 bp, synthetic construct
  source 1..75: mol_type = other DNA
tccttatttccgcgctgctattgcaagggtgcgttgctgccgctgtggtaggtactgctgctgtcggcaccaaag

SEQ ID NO: 891553 - DNA, 75 bp, synthetic construct
  source 1..75: mol_type = other DNA
tccgcgcattaagcaactggcccgtcgtaacacagtgactcccggtggtgaagtatgcgtatttaacgacatcat

SEQ ID NO: 891554 - DNA, 75 bp, synthetic construct
  source 1..75: mol_type = other DNA
ttgccattgatgacgcagcggcagcattcgaacgcgcgcagcaaaatgactccataaaagtcatgctgcaatttg

SEQ ID NO: 891555 - DNA, 75 bp, synthetic construct
  source 1..75: mol_type = other DNA
gacattcagtgcggacacgggggccagccaggattcggcacgctggggtgtgggtaaaccgttatatcaggacct

SEQ ID NO: 891556 - DNA, 75 bp, synthetic construct
  source 1..75: mol_type = other DNA
cagtatcgacaacctctggcgctacggtggtttcttcgccaccggctggaatgggctgattttgtcgctggcggt

SEQ ID NO: 891557 - DNA, 75 bp, synthetic construct
  source 1..75: mol_type = other DNA
cgtatatcccgaataacgcggggatcctgctggcaccatgctgtcgtggtggttcggcattcacccagggcgcgg

SEQ ID NO: 891558 - DNA, 75 bp, synthetic construct
  source 1..75: mol_type = other DNA
tctggcagtgggactaaatgcactgacgctgacggatattaccaaaaatgcaacgtatggcgttgagatggaaag

SEQ ID NO: 891559 - DNA, 75 bp, synthetic construct
  source 1..75: mol_type = other DNA
aataacgcggggatcctgctggtaccatgctgtcgtggtggttcggcattcacccagggcacggaggggacattc

SEQ ID NO: 891560 - DNA, 75 bp, synthetic construct
  source 1..75: mol_type = other DNA
tacctgacgtcgtggcgatgaccgggactggtaacccgttcctgatgtcgttcttcacccagaccacagacggca

SEQ ID NO: 891561 - DNA, 75 bp, synthetic construct
  source 1..75: mol_type = other DNA
tcgtgcgaaacagattgccatgggcgtagacggcgcaaccgaagtgtataacgagatccgccagggtcaaccaat

SEQ ID NO: 891562 - DNA, 75 bp, synthetic construct
  source 1..75: mol_type = other DNA
atttcagttcatgggcgcgcaggggcattattcctgatcgtctggcaactgctattctgaacgcagttggtcgaa

SEQ ID NO: 891563 - DNA, 75 bp, synthetic construct
  source 1..75: mol_type = other DNA
gtaacgactggcagacgctggagctggtgttcaccgccggcagtgccacggttactccgaaactgaatggagtgg

SEQ ID NO: 891564 - DNA, 75 bp, synthetic construct
  source 1..75: mol_type = other DNA
atgtgccgtggatttgtggtgacacgacgtattactggaaaaatacatacgctacccagtacgacaccgtgtacg

SEQ ID NO: 891565 - DNA, 75 bp, synthetic construct
  source 1..75: mol_type = other DNA
ctcagatacagtattctcctgagcagggtggggcaacagtatctggtgactatatttatcttgccaccccacaag

SEQ ID NO: 891566 - DNA, 75 bp, synthetic construct
  source 1..75: mol_type = other DNA
tggaacacggtgacgattgatgcgggtacgctgccgctgagcaccgaactgacgaacaccagtcagaaggtggtg

SEQ ID NO: 891567 - DNA, 75 bp, synthetic construct
  source 1..75: mol_type = other DNA
cggggagcgcgcctccggtgttttttcgccgtgctgcactggcgcttgccatatcagcggtgtttgccagtgttg

SEQ ID NO: 891568 - DNA, 75 bp, synthetic construct
  source 1..75: mol_type = other DNA
taaagcctgtctcgtccgtattgtttcgtcggaccgcgcttgcgcttgtcgtgtcagctgttttcgccagcgcca

SEQ ID NO: 891569 - DNA, 75 bp, synthetic construct
  source 1..75: mol_type = other DNA
tggaatgccggtgtcagtcagccggtgggggggctgttcagtctgtcggtgtccggctggcagcggagttactac

SEQ ID NO: 891570 - DNA, 75 bp, synthetic construct
  source 1..75: mol_type = other DNA
ctgagcacgcagattgaaggtgttggcgtgaacctcagctggaccggttcgcggaatgcggaaggtgaaaataac

SEQ ID NO: 891571 - DNA, 75 bp, synthetic construct
  source 1..75: mol_type = other DNA
gtcatacggttacggtctggacgggctgacgctgcgcaccgggggggtgtttaaccaggactggcagggcgtcag

SEQ ID NO: 891572 - DNA, 75 bp, synthetic construct
  source 1..75: mol_type = other DNA
gcagttatctgaatgcttcgtacagcggtgactgggcttatcttagtggggctctgaaccagtcatcatccggtg

SEQ ID NO: 891573 - DNA, 75 bp, synthetic construct
  source 1..75: mol_type = other DNA
ccggcggaaccagtggttctgtctcggtcagcggttcggtactggccgttccggcggcgaaagacattatgttca

SEQ ID NO: 891574 - DNA, 75 bp, synthetic construct
  source 1..75: mol_type = other DNA
tggtctgcatcggcgtcagtgtcggtaccgttcacactgtttgaccgtcgctacagcagcagtacgtcggtgagt

SEQ ID NO: 891575 - DNA, 75 bp, synthetic construct
  source 1..75: mol_type = other DNA
gtgctgatgattaacacggtggatgcaccgggtgatatcaccttggggcagtgccggatacctgcagcgaaaatg

SEQ ID NO: 891576 - DNA, 75 bp, synthetic construct
  source 1..75: mol_type = other DNA
gaacctgggcacgcgacagtaagaacacaccgctgggctttgtggccaacaatggtgtgctgatgattaacacgg

SEQ ID NO: 891577 - DNA, 75 bp, synthetic construct
  source 1..75: mol_type = other DNA
ggtggtcccgctgaacagctatgactggaacacggtgacgattgatgcgggcacgctgccgctgagtaccgaact

SEQ ID NO: 891578 - DNA, 75 bp, synthetic construct
  source 1..75: mol_type = other DNA
atgttcagccgcacgaccggggataccgtggccgtggtgaacgtgaaggatacccccggagtgaaggtgacgtcc

SEQ ID NO: 891579 - DNA, 75 bp, synthetic construct
  source 1..75: mol_type = other DNA
accgcatagcacgatggtgtttatcgggattcagttgccggaggaagagattcgggcagcgtttgcggggttgag

SEQ ID NO: 891580 - DNA, 75 bp, synthetic construct
  source 1..75: mol_type = other DNA
cgccagtctgatgattaccgttgcggcaatcatggtgttgttcccgcgcatgatccgcctgattgttgagggcct

SEQ ID NO: 891581 - DNA, 75 bp, synthetic construct
  source 1..75: mol_type = other DNA
tgtagagtacaaggatgctctgcaacctgccgatttttatcacaatttcaaacagcggggcatccgcgccgtaca

SEQ ID NO: 891582 - DNA, 75 bp, synthetic construct
  source 1..75: mol_type = other DNA
tggctgaagtacgtgcgaaagcacgcaacgaggggattaactataccgccagccgtcttgctgctgcgttcaatc

SEQ ID NO: 891583 - DNA, 75 bp, synthetic construct
  source 1..75: mol_type = other DNA
tgcgaatggcggcagaaaatgcaacccctggcgaatggtgttctgatgattactatggggtaattgccgatgccg

SEQ ID NO: 891584 - DNA, 75 bp, synthetic construct
  source 1..75: mol_type = other DNA
cgtattcagaccggcacctggcagggtatctggctgggggaacatcgcatccacggcggatcgcgtcgcatcatc

SEQ ID NO: 891585 - DNA, 75 bp, synthetic construct
  source 1..75: mol_type = other DNA
ggttgacctgtccctgaacgggaaggaagccgggaaacagatactggatgtgacaccacaggacagtgaagctct

SEQ ID NO: 891586 - DNA, 75 bp, synthetic construct
  source 1..75: mol_type = other DNA
gagggatatgacgccacacgacagtgctatgtgctgacaaaagccccgtcagtgaaggtggattttgatgtttcc

SEQ ID NO: 891587 - DNA, 75 bp, synthetic construct
  source 1..75: mol_type = other DNA
ggacggcaaaacgggtacagaacatcgtcgggctggaaggtatttcgataccgcaaggctacggttccagttcag

SEQ ID NO: 891588 - DNA, 75 bp, synthetic construct
  source 1..75: mol_type = other DNA
catgatcgtgattggccttatcttccgcatcccctggctgcaggcgattaaggcaggggtaacggttgggattgg

SEQ ID NO: 891589 - DNA, 75 bp, synthetic construct
  source 1..75: mol_type = other DNA
gttatttccttctatcattttccttgtgagttctggctgcgcatggcgcggccttttttttatgacctgccactg

SEQ ID NO: 891590 - DNA, 75 bp, synthetic construct
  source 1..75: mol_type = other DNA
gtgtgtgcaggaaagaaggaaatcgcagagccggtttcatccgtgtttttctgtcgggccgtagttgcgattgct

SEQ ID NO: 891591 - DNA, 75 bp, synthetic construct
  source 1..75: mol_type = other DNA
aaattgtttgtaccgtacgccattacggactggcgcatgacaaattgctgatggtggaaatgattgatccacaag

SEQ ID NO: 891592 - DNA, 75 bp, synthetic construct
  source 1..75: mol_type = other DNA
tgacgggttcggaagcctcagtgaccgtgacttttcaaaacagagcgctaagcgcccgattaaaaaggctcaccc

SEQ ID NO: 891593 - DNA, 75 bp, synthetic construct
  source 1..75: mol_type = other DNA
gcatttcacgggcgcggttaacgtttgaaggtttcggcagtttacgtgacagcgatttttcgaagcgcaccgcga

SEQ ID NO: 891594 - DNA, 75 bp, synthetic construct
  source 1..75: mol_type = other DNA
tggatgcgccgggggatatcaccctgggccagtgccggatacctgcggcgaaactgcaggatactgagaaactac

SEQ ID NO: 891595 - DNA, 75 bp, synthetic construct
  source 1..75: mol_type = other DNA
cattgtataccagtggggatgtgaccatgaaggttaccggtgaggacgggcgtgagcagacccaggtctttccgc

SEQ ID NO: 891596 - DNA, 75 bp, synthetic construct
  source 1..75: mol_type = other DNA
acatcgactctatccgcttcacttggcaacggaaggactcattgaaaaggccggtaaaagaggagcttttgcaac

SEQ ID NO: 891597 - DNA, 75 bp, synthetic construct
  source 1..75: mol_type = other DNA
cgaaatcgatattattatggcctggcgtcgcgacagtatgggggaggcaaaatcctggtgtttgcgagaaatccc

SEQ ID NO: 891598 - DNA, 75 bp, synthetic construct
  source 1..75: mol_type = other DNA
cacgaggcgctatggagaaagcgaagaaagtccgtcagcgatgcggtgaagttttccgctatgccatcgtaacgg

SEQ ID NO: 891599 - DNA, 75 bp, synthetic construct
  source 1..75: mol_type = other DNA
cgctatgccattgtcactgggcgggctgaatacaacccagctccggatctcaccagcgctatgcaggggcatgaa

SEQ ID NO: 891600 - DNA, 75 bp, synthetic construct
  source 1..75: mol_type = other DNA
atattggccagcagccggtgaatgaaatcaaacctttggtactgctgaatgtgctgcgtcgaatggaaagccgtg

SEQ ID NO: 891601 - DNA, 75 bp, synthetic construct
  source 1..75: mol_type = other DNA
acgctgctaaacccagagagaaagcctataagctggcagatggtgctggtttgtatcttgaggttgtgccctctg

SEQ ID NO: 891602 - DNA, 75 bp, synthetic construct
  source 1..75: mol_type = other DNA
gcgccggatatgcattttcgttcctcgtcggagatcaactcgcgcaaactctataccttaatgaacgtctacgtt

SEQ ID NO: 891603 - DNA, 75 bp, synthetic construct
  source 1..75: mol_type = other DNA
acggcttcctggggtctgaatctgacattccagtgccaggagtgcggagagtggttcagataaaaaagacgcatc

SEQ ID NO: 891604 - DNA, 75 bp, synthetic construct
  source 1..75: mol_type = other DNA
aacaatactgcgccggtaaaactgggcacgaccgaattaaccaccaccgcgacggaatatcgtggtactaccgat

SEQ ID NO: 891605 - DNA, 75 bp, synthetic construct
  source 1..75: mol_type = other DNA
atcttcacaacggggggtacaagacccgcgttcggcaggatgtgaaagataaactttatggcacagggaaaatga

SEQ ID NO: 891606 - DNA, 75 bp, synthetic construct
  source 1..75: mol_type = other DNA
ctacacaaaagttagtcctatcaattcctcagattggcttatcggcgaagccggaggatctggaatgggactacg

SEQ ID NO: 891607 - DNA, 75 bp, synthetic construct
  source 1..75: mol_type = other DNA
ttcgcagggagagaataacaggtcggcgtcagcctctatctcggtgccattcacgctgtttgagcgtcgctacag

SEQ ID NO: 891608 - DNA, 75 bp, synthetic construct
  source 1..75: mol_type = other DNA
ccggcacagatgactggccgttatcggtacagcgatgacaatggtctggacacagggattaccggtaccctgagc

SEQ ID NO: 891609 - DNA, 75 bp, synthetic construct
  source 1..75: mol_type = other DNA
ggatacggcagaggttatctggacattaagtactactcgtacacagtataatgctggaatgcgtctggagaaacg

SEQ ID NO: 891610 - DNA, 75 bp, synthetic construct
  source 1..75: mol_type = other DNA
cacccggaaatgttatgcgctgtcaaaagcgcaggctgtaaaagtggattttgatgtttccacacagagtctggt

SEQ ID NO: 891611 - DNA, 75 bp, synthetic construct
  source 1..75: mol_type = other DNA
ttaaccatcgaccttttcgtcgcactctgctggtaatggctgttatggctgctcttgaaagcggagcgtcatatg

SEQ ID NO: 891612 - DNA, 75 bp, synthetic construct
  source 1..75: mol_type = other DNA
attgttaacggaaaaactcatgggaagcagatcctagatgttacgctaaatgacaacgatggtttatgtctgacg

SEQ ID NO: 891613 - DNA, 75 bp, synthetic construct
  source 1..75: mol_type = other DNA
cgggaaacttgggttataaacctgtcttctccggtatagctaatggtcccgctagggtcacgttggttcagaatg

SEQ ID NO: 891614 - DNA, 75 bp, synthetic construct
  source 1..75: mol_type = other DNA
gggaaatgataactggtcggcatccgcttcggtttcggttccgttcacattgtttgaccgccggtacagcagcag

SEQ ID NO: 891615 - DNA, 75 bp, synthetic construct
  source 1..75: mol_type = other DNA
gcctggagtaaacaacttgaggtaacgaatacaggtttacgggtgagctgggcgcaccagagtgaggaatatgaa

SEQ ID NO: 891616 - DNA, 75 bp, synthetic construct
  source 1..75: mol_type = other DNA
cgtcagcgctttttcgaaaacgcagccaggtggctatgccgacaatcaccccgagctggaacagttctcaccgca

SEQ ID NO: 891617 - DNA, 75 bp, synthetic construct
  source 1..75: mol_type = other DNA
gatggggtgatggtttatcaagagacgtatcacgaggcgacatatgcccgccatcatctgaaagggaaaaaacag

SEQ ID NO: 891618 - DNA, 75 bp, synthetic construct
  source 1..75: mol_type = other DNA
tttcttgatgccatgtacggcgatatgccaaataactggtcaccggaattgcgggggctgggaagactgcggttt

SEQ ID NO: 891619 - DNA, 75 bp, synthetic construct
  source 1..75: mol_type = other DNA
gatggggtaatggtttatcaggagacatatcacgaggcgacgtatgcccgccatcatctgaaagggaaaaaacag

SEQ ID NO: 891620 - DNA, 75 bp, synthetic construct
  source 1..75: mol_type = other DNA
tttgcgctaacgactgcacgtactgcggattttccatgagcaatcgcatcaagcgcaaaacgctggatgaagcgg

SEQ ID NO: 891621 - DNA, 75 bp, synthetic construct
  source 1..75: mol_type = other DNA
cgtcagcgccttctcgaaaacgcagccaggtggctatgccgacaatcaccccgaactggaacaattctcaccgca

SEQ ID NO: 891622 - DNA, 75 bp, synthetic construct
  source 1..75: mol_type = other DNA
gccgcaagctggaagcactggacgaagagcagtcttttatccgcgccgtctacggtgtcggttatcgctgggaag

SEQ ID NO: 891623 - DNA, 75 bp, synthetic construct
  source 1..75: mol_type = other DNA
ctcattgattatctgcgtgctgcgagctatgcgccgacgcttatcagccacggcgatcaggtactgccgtatgtg

SEQ ID NO: 891624 - DNA, 75 bp, synthetic construct
  source 1..75: mol_type = other DNA
tgccaaataactggtcaccggaattgcgggggctgggaagactgcgttttatcaccaacgcctttacccgtatgc

SEQ ID NO: 891625 - DNA, 75 bp, synthetic construct
  source 1..75: mol_type = other DNA
aagcaggcgtcatgatgacccaaggcactttggtggatgccaccatcattgaggcacccaactcgaccaagaaca

SEQ ID NO: 891626 - DNA, 75 bp, synthetic construct
  source 1..75: mol_type = other DNA
tcgtgatggtgacggcaaaaatcgaagagatcgatcgcctgctggggctggagattggcgcagatgactacatct

SEQ ID NO: 891627 - DNA, 75 bp, synthetic construct
  source 1..75: mol_type = other DNA
agtgaatacctggaaccactggctcaacgggcgcagcgtctgacccgccagcgatttggcaacgtcgtcagcttc

SEQ ID NO: 891628 - DNA, 75 bp, synthetic construct
  source 1..75: mol_type = other DNA
tcgttggcagcatagagaactgcattaagacagtgattaacctaccatcagaaagtgtgaaagggctgcgggtgc

SEQ ID NO: 891629 - DNA, 75 bp, synthetic construct
  source 1..75: mol_type = other DNA
gcgaagacattattcgcagcattggaaccagcattaaaacagtgatgaatctaccatcagaaagcgtggaagggc

SEQ ID NO: 891630 - DNA, 75 bp, synthetic construct
  source 1..75: mol_type = other DNA
ggatcgatgttgtttcgtttggcaactcgcttcatgacccggattgctactacctcattcgcgcctttgacagcg

SEQ ID NO: 891631 - DNA, 75 bp, synthetic construct
  source 1..75: mol_type = other DNA
ggcatatgaccgggctgcattacaaccctatcactaactcctttaagctcggccccggcgtggatgtgaactata

SEQ ID NO: 891632 - DNA, 75 bp, synthetic construct
  source 1..75: mol_type = other DNA
agaacagacctttacggatgaggcttccgccccggtgctgaacgggttatatcaggcactcgaaaatcgcctgat

SEQ ID NO: 891633 - DNA, 75 bp, synthetic construct
  source 1..75: mol_type = other DNA
acaccttacgcaaaggcagcggtgccacttttcatgccatcatgcaggaaatcagcgttcccctacaccagcgcc

SEQ ID NO: 891634 - DNA, 75 bp, synthetic construct
  source 1..75: mol_type = other DNA
agttactgcgtaacgaaagccccagggcgattgacttcaccattacccacggtaagggacgcaagggaatcatta

SEQ ID NO: 891635 - DNA, 75 bp, synthetic construct
  source 1..75: mol_type = other DNA
cgtcagcgccttctcgaaaacgcagccaggtggctatgccgataatcaccccgagttggaacagttctcaccgca

SEQ ID NO: 891636 - DNA, 75 bp, synthetic construct
  source 1..75: mol_type = other DNA
atgcaggaacctcgttgtattgctcagttattgcgtaacgaaagccccagggcgattgacttcaccatcacccac

SEQ ID NO: 891637 - DNA, 75 bp, synthetic construct
  source 1..75: mol_type = other DNA
ggtaaggggcgtaagggaatcattatccgcaccaaaaaacagagtccgttaaaaaaggttctgacctttctgaaa

SEQ ID NO: 891638 - DNA, 75 bp, synthetic construct
  source 1..75: mol_type = other DNA
agttactgcgtaacgaaagccccagggcgattgacttcaccatcacccacggtaaggggcgtaagggaatcatta

SEQ ID NO: 891639 - DNA, 75 bp, synthetic construct
  source 1..75: mol_type = other DNA
aaccaactggcgatgttactcaccctggccaacctgtttcgggtggaccaaatgatacgtcaggggagagatctc

SEQ ID NO: 891640 - DNA, 75 bp, synthetic construct
  source 1..75: mol_type = other DNA
aatcgtttgccatcgcgttcccacggtgcggcttgggtgtgcggttacgaccacgaaaaatcaatggtgattacc

SEQ ID NO: 891641 - DNA, 75 bp, synthetic construct
  source 1..75: mol_type = other DNA
atatctgtgcaatagacggaaggatgccgcaaatcccagccaccgacgctttcctggcggatgtgcgggctgggg

SEQ ID NO: 891642 - DNA, 75 bp, synthetic construct
  source 1..75: mol_type = other DNA
tcgcctccatgcgactgtttgcccgcttatccctggatagcgccgtgccggaacgcaccaccatcatgaatttcc

SEQ ID NO: 891643 - DNA, 75 bp, synthetic construct
  source 1..75: mol_type = other DNA
tcgcctccatgcgactgtttgcccgcttatccctggatagcgccttgccggatcgcaccaccatcatgaatttcc

SEQ ID NO: 891644 - DNA, 75 bp, synthetic construct
  source 1..75: mol_type = other DNA
tcgcctccatgcgactgtttgcccgcttatccctggatagcgccatgccggagcgcaccaccatcatgaatttcc

SEQ ID NO: 891645 - DNA, 75 bp, synthetic construct
  source 1..75: mol_type = other DNA
cgccctgcctgcacctcccgatttaagcggtggcgcgggaacaagttcagtgtctggcccgcagggtgacattct

SEQ ID NO: 891646 - DNA, 75 bp, synthetic construct
  source 1..75: mol_type = other DNA
tgccctgccagcgccccccgacttaagcggcggagcgggaacaaattcagtatctggcccgcagggtgatattct

SEQ ID NO: 891647 - DNA, 75 bp, synthetic construct
  source 1..75: mol_type = other DNA
cggcaactttatggtgcaagtcggggccgtaagcgatcaggctcgtgcgcaacagtaccaacagcaactgggaca

SEQ ID NO: 891648 - DNA, 75 bp, synthetic construct
  source 1..75: mol_type = other DNA
cgcattgcagagctggaagctaatcttgtggcgctggcggcggagaatgcagggctgaataaatttatcgcacag

SEQ ID NO: 891649 - DNA, 75 bp, synthetic construct
  source 1..75: mol_type = other DNA
tcgctttctggccccggcatggcctgtacaaccgttgccaaacagacttacgttctgcctgcgcctcctgactta

SEQ ID NO: 891650 - DNA, 75 bp, synthetic construct
  source 1..75: mol_type = other DNA
tccggtcagtaattcgacgctaaaaagcgaagatccgaccggcgcgccggtaaccagcagcggtttcctcggcgc

SEQ ID NO: 891651 - DNA, 75 bp, synthetic construct
  source 1..75: mol_type = other DNA
tcgcctccatgcgtctgtttgcccgcttatccctggatagcgccttgccggagcgcaccaccatcatgaatttcc

SEQ ID NO: 891652 - DNA, 75 bp, synthetic construct
  source 1..75: mol_type = other DNA
gtcacgtaaatcacgtcagggcgcaggttaagccagtcagcaagggggtaaaccatgcagcagcaccaggtggca

SEQ ID NO: 891653 - DNA, 75 bp, synthetic construct
  source 1..75: mol_type = other DNA
gtaattgattcaattttgcaggcgatgcaggggcgggtgcttgatggagatttaatcactggatgggaaaaacgc

SEQ ID NO: 891654 - DNA, 75 bp, synthetic construct
  source 1..75: mol_type = other DNA
cggaacctgattacctggaaggcctgagcgaacccatcgggaaatttccgatgaccgatgggtggcatccgtcgc

SEQ ID NO: 891655 - DNA, 75 bp, synthetic construct
  source 1..75: mol_type = other DNA
ctcaatgagaattgtgaccccactgtacgctatgacatggagcgttttttcctccgcgcggttcccgataacgga

SEQ ID NO: 891656 - DNA, 75 bp, synthetic construct
  source 1..75: mol_type = other DNA
ttcagaccggcacctggcagggtatctggctgggggaacatcgtgtccacggcggatcgcgtcgcatcatcgcga

SEQ ID NO: 891657 - DNA, 75 bp, synthetic construct
  source 1..75: mol_type = other DNA
atcctcaatgctgggagtatcgcttgttttgccagtgcataaaggacgtattcagaccggcacctggcagggtat

SEQ ID NO: 891658 - DNA, 75 bp, synthetic construct
  source 1..75: mol_type = other DNA
tcgcctccatgcgcctgtttgcccgcttatccctggatagcgccctgccggagcgcaccaccatcatgaatttcc

SEQ ID NO: 891659 - DNA, 75 bp, synthetic construct
  source 1..75: mol_type = other DNA
tcgcctccatgcgtctgtttgcccgcttatccctggatagcgccgtgccggatcgcaccaccatcatgaatttcc

SEQ ID NO: 891660 - DNA, 75 bp, synthetic construct
  source 1..75: mol_type = other DNA
acactgattgtcacgatgagtcacgacgcgtcacgcatatgtcacgacaaatcacgacagatacagataaagaat

SEQ ID NO: 891661 - DNA, 75 bp, synthetic construct
  source 1..75: mol_type = other DNA
gaattaaaccccacacattacgcgcgcgtgcgcgagagtgctccgaccagtgagtcgaacggtacgccgttgcag

SEQ ID NO: 891662 - DNA, 75 bp, synthetic construct
  source 1..75: mol_type = other DNA
ccgcgctattactgagccgcgcgctgaacagtttgagcctcggcagtgacaccgcgacggcgctgggcagtcgcg

SEQ ID NO: 891663 - DNA, 75 bp, synthetic construct
  source 1..75: mol_type = other DNA
ttggccttgccgggggcgttaatgcaaaccctcacccgaaacccacttgccgatcctggtttgcttggcgtgaac

SEQ ID NO: 891664 - DNA, 75 bp, synthetic construct
  source 1..75: mol_type = other DNA
cggcttgcttggcgtgaatgccggagccagctttgccattgtgctgggtgcggcgctgtttggttactcatccgc

SEQ ID NO: 891665 - DNA, 75 bp, synthetic construct
  source 1..75: mol_type = other DNA
aagccggttcgctggatattcgcaatctacataccttaaaagtggtgctgatcccggtgcttaccgccggagcaa

SEQ ID NO: 891666 - DNA, 75 bp, synthetic construct
  source 1..75: mol_type = other DNA
gccgactgcaccatcgtgctagacgcccgactgccgcgcacccttgccggattgctggcaggcggtgcgcttggt

SEQ ID NO: 891667 - DNA, 75 bp, synthetic construct
  source 1..75: mol_type = other DNA
gctggcgattaccgtgctttgcggtagtgcgacggcagtggtgggtccgattgcctttattggcctgatgatgcc

SEQ ID NO: 891668 - DNA, 75 bp, synthetic construct
  source 1..75: mol_type = other DNA
atcatttatggttgcattactattcatattttgcaaggaaaattataaagaatatgaataggcaatcggatgaat

SEQ ID NO: 891669 - DNA, 75 bp, synthetic construct
  source 1..75: mol_type = other DNA
atggtcctgtattcagaacaccgcaattatccgtattggaggccagactacagccgggttacgtcatttatttgg

SEQ ID NO: 891670 - DNA, 75 bp, synthetic construct
  source 1..75: mol_type = other DNA
acattaaaaaatctggtgtgctgacagaggctgccattgacgagccacgatttgaacgtgatggcctgcttattg

SEQ ID NO: 891671 - DNA, 75 bp, synthetic construct
  source 1..75: mol_type = other DNA
accgtttaacgattcgctggatatgattacgggcttttcgccgtcatataaaaaaattgttattggtgatgatga

SEQ ID NO: 891672 - DNA, 75 bp, synthetic construct
  source 1..75: mol_type = other DNA
tgcctctgcatcagccaacagtcaaaaagctgcaaaaaccagtgaaaccaacgcaaaggcgagcgagactgcggc

SEQ ID NO: 891673 - DNA, 75 bp, synthetic construct
  source 1..75: mol_type = other DNA
tagctgccatttttattgatagcgccacactagatacattcacgtctggagcagatgcgtctaatattgctgtga

SEQ ID NO: 891674 - DNA, 75 bp, synthetic construct
  source 1..75: mol_type = other DNA
ctgaataacaatggcaagcttccggtgttgattcaaagttgggtggataatggtgacccagataaaaaaccagat

SEQ ID NO: 891675 - DNA, 75 bp, synthetic construct
  source 1..75: mol_type = other DNA
aagtactaatctcaatttaaacatacctaaaagtacaaagtaccgccttgttaaacgaatgctttctactctagg

SEQ ID NO: 891676 - DNA, 75 bp, synthetic construct
  source 1..75: mol_type = other DNA
cgccagtctgctcggctccacgccaatgatgtctaacagttcattcaagccgacgccgcttcgcggcgcagctta

SEQ ID NO: 891677 - DNA, 75 bp, synthetic construct
  source 1..75: mol_type = other DNA
tactgaaatcgagatgatcgccgcaatggccgccgatgccgttcgccagcagaagcgcctgaatcatgttgaaaa

SEQ ID NO: 891678 - DNA, 75 bp, synthetic construct
  source 1..75: mol_type = other DNA
atcaggatcatggcccggaacatagtgagtttgttgatttcttcgctacttacaaagcaacgctgcctgcgattg

SEQ ID NO: 891679 - DNA, 75 bp, synthetic construct
  source 1..75: mol_type = other DNA
agtagcatggagacacattctccttggagggaattattcttttgaagatcaagttgcgatcacaaatttggacag

SEQ ID NO: 891680 - DNA, 75 bp, synthetic construct
  source 1..75: mol_type = other DNA
tcaaagtacggttgttaagaagttatctaatacaaagcgtagcaacaagacattagcagcacttcgggagtatga

SEQ ID NO: 891681 - DNA, 75 bp, synthetic construct
  source 1..75: mol_type = other DNA
acgttaccgaaactgtcgaacaaatcaaaagaggcgccatacgcgatggttatgcaggctatcgtcagctggcgg

SEQ ID NO: 891682 - DNA, 75 bp, synthetic construct
  source 1..75: mol_type = other DNA
ttttatatatatatgagacgcatgtttaatgacgaattatatataaaaccaagtgcatcaaaaaataagaaagaa

SEQ ID NO: 891683 - DNA, 75 bp, synthetic construct
  source 1..75: mol_type = other DNA
caaggattaaactattttatcggcctgttaatttgataaaaaaagaaaaatctcaagatgcttttgaaaatcttt

SEQ ID NO: 891684 - DNA, 75 bp, synthetic construct
  source 1..75: mol_type = other DNA
attcaacgatgatttggcctggaaggtccagcgcgaactggttaacagctacttccgcactcgcgcaccgctaac

SEQ ID NO: 891685 - DNA, 75 bp, synthetic construct
  source 1..75: mol_type = other DNA
tcgagcttgagccatttatggcggcgttccaccaaatgatgtcagaggctgaaccacacggcacacgctggtatc

SEQ ID NO: 891686 - DNA, 75 bp, synthetic construct
  source 1..75: mol_type = other DNA
cctttcatggctgcttttcatcgcatgatgagtgaagcagagccacgaggtgcacgctggtatcacccgaaaatg

SEQ ID NO: 891687 - DNA, 75 bp, synthetic construct
  source 1..75: mol_type = other DNA
gatcttcggcagatgggccagacggatttccttattgcgatattggtggatcaaataggcgtgttaacgaaaacg

SEQ ID NO: 891688 - DNA, 75 bp, synthetic construct
  source 1..75: mol_type = other DNA
agatatgttttacagccgctgccggatgtgtggataccctttaatgattcgctggatatgattacgggctattct

SEQ ID NO: 891689 - DNA, 75 bp, synthetic construct
  source 1..75: mol_type = other DNA
tgatggcctgcttattgaggggcaaagaacaaactacatgctcaattcggaaaaccctgccagttgggggcgatc

SEQ ID NO: 891690 - DNA, 75 bp, synthetic construct
  source 1..75: mol_type = other DNA
agattacgacggatttccttattgcgatattggtgggtctaacagacggataaacgaaaatgcatcacttgaaaa

SEQ ID NO: 891691 - DNA, 75 bp, synthetic construct
  source 1..75: mol_type = other DNA
ttccttttacggttctttgtgaggtacataagaactggtataaaacgccaaatgcagcaccgcgtgtttttaaaa

SEQ ID NO: 891692 - DNA, 75 bp, synthetic construct
  source 1..75: mol_type = other DNA
ctaactcggcgaaagcatccgctgcaagccagacggctgcaaaagcaagtgaagacgcagccagagagtatgcaa

SEQ ID NO: 891693 - DNA, 75 bp, synthetic construct
  source 1..75: mol_type = other DNA
ctaccttttacggttctttgtgaggtacataagaactggtataaaacgccaaatgcagcaccgcgtgtttttgat

SEQ ID NO: 891694 - DNA, 75 bp, synthetic construct
  source 1..75: mol_type = other DNA
ttattcttggcttcggtcgttcaacagattacgacggatttccttattgcgatattggaggagctaacagacggg

SEQ ID NO: 891695 - DNA, 75 bp, synthetic construct
  source 1..75: mol_type = other DNA
aacgcaaagtccagccagacggcagcgaagaccagcgaaacgaatgccaaagccagtgaaactgcggcgaaaagc

SEQ ID NO: 891696 - DNA, 75 bp, synthetic construct
  source 1..75: mol_type = other DNA
gaaaaaactggcggagcagccaatagaatagcagctactgcaactaaagatccggttacagggtggattttctat

SEQ ID NO: 891697 - DNA, 75 bp, synthetic construct
  source 1..75: mol_type = other DNA
atttatttggtcatatcaggaatttcagaatatggcataaagcattaacagaccaacaaatggctgaggttattt

SEQ ID NO: 891698 - DNA, 75 bp, synthetic construct
  source 1..75: mol_type = other DNA
gtaaaatcagatcagtctacgtgctcagtaagtaacgggcgcatatccagcgaaaaaaagactacgtggtcctat

SEQ ID NO: 891699 - DNA, 75 bp, synthetic construct
  source 1..75: mol_type = other DNA
gcagcgcttcatctaatcttggatatgccattgttaatacgcggtctttattggttgaaatcaccggtgtagctg

SEQ ID NO: 891700 - DNA, 75 bp, synthetic construct
  source 1..75: mol_type = other DNA
ttccttttacggttctttgtgaggtacataagaactggtataaaacgccaaatgcagcaccgcgtgtttttcaca

SEQ ID NO: 891701 - DNA, 75 bp, synthetic construct
  source 1..75: mol_type = other DNA
cggcgaaagcatccgctgcaagccagaccgctgcaaaagcaagtgaagacgcagccagagagtatgcaagccagg

SEQ ID NO: 891702 - DNA, 75 bp, synthetic construct
  source 1..75: mol_type = other DNA
ggtggaagaagcggcacgcaacgctgaagccgcctctcagagcgcagcggcggcaaagaaatccgaaactgcagc

SEQ ID NO: 891703 - DNA, 75 bp, synthetic construct
  source 1..75: mol_type = other DNA
cagaactgcacaatccagctgaaagcaaaacgtaacagtaccacggtactggtgaacacggtggcctctgaaaat

SEQ ID NO: 891704 - DNA, 75 bp, synthetic construct
  source 1..75: mol_type = other DNA
tctggtgactatatttatctggccaccccacaagtagaagatgggccttgtgtatcatcttttattatatcagga

SEQ ID NO: 891705 - DNA, 75 bp, synthetic construct
  source 1..75: mol_type = other DNA
ggtggttttaatatttattctgatggtactaaacgagtagtttctaacggtgaggctactaaaaccatgaaaacg

SEQ ID NO: 891706 - DNA, 75 bp, synthetic construct
  source 1..75: mol_type = other DNA
ttttacctatggaaagtttgtctgtaacgattctctgattgggcaaacctcagccattaatatggcatcaattgc

SEQ ID NO: 891707 - DNA, 75 bp, synthetic construct
  source 1..75: mol_type = other DNA
tgaacggtataactcggaaggatacactttcctttgtgacgcctatttgtcattacagacccatgaactacaaat

SEQ ID NO: 891708 - DNA, 75 bp, synthetic construct
  source 1..75: mol_type = other DNA
acccgtgaactacaaattactggtggcaatgcccagctattaacagcaaactttgaaatcgaccctggaagtgga

SEQ ID NO: 891709 - DNA, 75 bp, synthetic construct
  source 1..75: mol_type = other DNA
ttccttttacggttctttgtgaggtacataagaactggtataaaacgccaaatgcagcaccgcgtgtttttgaga

SEQ ID NO: 891710 - DNA, 75 bp, synthetic construct
  source 1..75: mol_type = other DNA
ggcgcatctgcaaaacttctaccagagttttggttttatccctgtgacggaggtctatgaagaagatggtatccc

SEQ ID NO: 891711 - DNA, 75 bp, synthetic construct
  source 1..75: mol_type = other DNA
ttgacgggggataatcgccatattctcggttggaaaaatgatgaactggtggcatatgcgaggattctgaaaagt

SEQ ID NO: 891712 - DNA, 75 bp, synthetic construct
  source 1..75: mol_type = other DNA
gaaaccaacgcaaagtccagccagacggcagcgaaaaccagcgaaacgaatgccaaagccagtgaaactgcggcg

SEQ ID NO: 891713 - DNA, 75 bp, synthetic construct
  source 1..75: mol_type = other DNA
gccgagggtatcgatccatcgtttgccaagaaagaagaaaagctggttcgggatgtacagctcaataatacgttt

SEQ ID NO: 891714 - DNA, 75 bp, synthetic construct
  source 1..75: mol_type = other DNA
aaccagcgcgatgtcaggacatgaatcgaagcattatcccttccttaccgttgaggagttaccagacttctttaa

SEQ ID NO: 891715 - DNA, 75 bp, synthetic construct
  source 1..75: mol_type = other DNA
ggccgcacagctggatgccgaacgccagaaagtcagcgaactgacggcgcaactggaagaagaacgccagaaagt

SEQ ID NO: 891716 - DNA, 75 bp, synthetic construct
  source 1..75: mol_type = other DNA
tccaatcatttcccattcctaaaagctgatgagatacctgattttctacgtgccttagagggttactccgggagt

SEQ ID NO: 891717 - DNA, 75 bp, synthetic construct
  source 1..75: mol_type = other DNA
gtgcgttggagaaaatgcgcaaagtgcggcagcgttgctccgaagtgtttcgctacgcaattgcaacgggtaggg

SEQ ID NO: 891718 - DNA, 75 bp, synthetic construct
  source 1..75: mol_type = other DNA
tatcgagttgcgagcggcattatggcaagagtttgatctggacaacgctatttgggaaattcctgccgaaagaat

SEQ ID NO: 891719 - DNA, 75 bp, synthetic construct
  source 1..75: mol_type = other DNA
cgcaattgctcacatctccggaagcctgaaggcgatagcgaaagacctgaaaacaccggttatctccctgagtca

SEQ ID NO: 891720 - DNA, 75 bp, synthetic construct
  source 1..75: mol_type = other DNA
tttaataacgcgtatgaccggaaattattaggtactaaatcaattcctgatattagtcttgcagttaattacttg

SEQ ID NO: 891721 - DNA, 75 bp, synthetic construct
  source 1..75: mol_type = other DNA
cgaagcgcccgctttcccgaccaataaccggatggtgaccagttggttcccggaacatgaacgtgcttctgccgt

SEQ ID NO: 891722 - DNA, 75 bp, synthetic construct
  source 1..75: mol_type = other DNA
gaaaatgcggcggcctcatattgtgaaccgccccgggtttcctggagagtgttttatctgtgaactcaggctgcc

SEQ ID NO: 891723 - DNA, 75 bp, synthetic construct
  source 1..75: mol_type = other DNA
gagttggtagtgttagccgcccgactaatgatcatcactggtgttcgaacgggtgaattacgtggtgcgttatgg

SEQ ID NO: 891724 - DNA, 75 bp, synthetic construct
  source 1..75: mol_type = other DNA
gtaatagaattcgcggtacatataatcatgcaacattcattgaagaaagaaggaaaatgttgaactttttctctt

SEQ ID NO: 891725 - DNA, 75 bp, synthetic construct
  source 1..75: mol_type = other DNA
tgggcaatatcctctggtgttcccagggaggaatgacccccgtaaaacgatgagcgaagcgagtattaatcaggt

SEQ ID NO: 891726 - DNA, 75 bp, synthetic construct
  source 1..75: mol_type = other DNA
ataatcactaagacagctactcagatcattatgttaaccggcgtacgaacacaagtgatcttacccagcaatagt

SEQ ID NO: 891727 - DNA, 75 bp, synthetic construct
  source 1..75: mol_type = other DNA
tgagtgaggccagcataaaccaagtatttaagcgcattggttataacggaaaggttactggccacggtttccgac

SEQ ID NO: 891728 - DNA, 75 bp, synthetic construct
  source 1..75: mol_type = other DNA
ccaaagaattacctgattttttcaaggcattgtccagttactcaggaagtgcattggttgttatggcggctcgtt

SEQ ID NO: 891729 - DNA, 75 bp, synthetic construct
  source 1..75: mol_type = other DNA
tgggcaatatccactggtattcccagggcgaaatgatccccgcaaaacgatgagcgaagcgagtataaatcaggt

SEQ ID NO: 891730 - DNA, 75 bp, synthetic construct
  source 1..75: mol_type = other DNA
caggagatgctccagtggtacgccgactatatggactcactggaacagggcgggaatgtggtacatggcaagttt

SEQ ID NO: 891731 - DNA, 75 bp, synthetic construct
  source 1..75: mol_type = other DNA
tactgatgattacgggtgtgagaactatcgaattacgcgctgcattatggcaagaatttgatctgggtaacgcta

SEQ ID NO: 891732 - DNA, 75 bp, synthetic construct
  source 1..75: mol_type = other DNA
tttcccttgcacaagcgagggctctgcgtgatgaagccaagaaaaagctggccgagggtatcgacccgtctttcg

SEQ ID NO: 891733 - DNA, 75 bp, synthetic construct
  source 1..75: mol_type = other DNA
tgtcccttgcacaagcgagggcactgcgtgacgacgccaagaaaaagcttgccgaaggtatcgatccatcgcttg

SEQ ID NO: 891734 - DNA, 75 bp, synthetic construct
  source 1..75: mol_type = other DNA
aatcaaaccgctggttctgcttaatgtgctgcgtcgaatggaaagccgtggcgcgacagagaaggccaagaaggt

SEQ ID NO: 891735 - DNA, 75 bp, synthetic construct
  source 1..75: mol_type = other DNA
aacatgatcccggtgatcattgtcgcgattctggtggcgctggggctgaaattcatcccggaaaaaatgatcaac

SEQ ID NO: 891736 - DNA, 75 bp, synthetic construct
  source 1..75: mol_type = other DNA
aggggaaaggcgtgaaaaacgcgtcaaccgtatcggaagatactgcgtcgaatcaagagccgacgcttcatcgcg

SEQ ID NO: 891737 - DNA, 75 bp, synthetic construct
  source 1..75: mol_type = other DNA
ctatccgtgggtggaagtgaaatccaacagtagcccgtttgtgatgattttccataatctcgacagcaacgtggt

SEQ ID NO: 891738 - DNA, 75 bp, synthetic construct
  source 1..75: mol_type = other DNA
gctcggcgtgctggcgggcattgtgaccattccgattggttgtatcgctggtggtctggttgctatgtactccgg

SEQ ID NO: 891739 - DNA, 75 bp, synthetic construct
  source 1..75: mol_type = other DNA
gaactgatccccggtctggatcctatctttatggcccctggcgataaacccggtgaagtgatgcgcgccattgaa

SEQ ID NO: 891740 - DNA, 75 bp, synthetic construct
  source 1..75: mol_type = other DNA
agcagatggatactcgcggcaaagtcatcaactgcgccttcgccgtttccgcagccttcgccctgggcgaccatt

SEQ ID NO: 891741 - DNA, 75 bp, synthetic construct
  source 1..75: mol_type = other DNA
tcctgcgagcctttttccatagagaaaacaatattatctcttgggaaaaaatcgcgggtggcctgctagaagcat

SEQ ID NO: 891742 - DNA, 75 bp, synthetic construct
  source 1..75: mol_type = other DNA
gtattaaaccattcatccagtcggtacgtcaggggtactggggatattatttacccgatcaggatcatggcccag

SEQ ID NO: 891743 - DNA, 75 bp, synthetic construct
  source 1..75: mol_type = other DNA
gtgcggggcaagttgcgccgctacactatcaccagattgatttttgccttatccgaaactggaaaagcatggaaa

SEQ ID NO: 891744 - DNA, 75 bp, synthetic construct
  source 1..75: mol_type = other DNA
ggtgtgccgattaactcgctgatgctttccggagcgatcacttcgctggtggtgttaatcaactatctgctgccg

SEQ ID NO: 891745 - DNA, 75 bp, synthetic construct
  source 1..75: mol_type = other DNA
tcatatacaccaatacatgtgaaaagaaagtcagttatatttctgcaacagaagatataaacatcgctataatgc

SEQ ID NO: 891746 - DNA, 75 bp, synthetic construct
  source 1..75: mol_type = other DNA
tattagacgcgcacgtcggtacctcgtggtcagactttaaccgccagcgcacgatgctggatccgagcgacccgg

SEQ ID NO: 891747 - DNA, 75 bp, synthetic construct
  source 1..75: mol_type = other DNA
tcgccgtttccgctgctttcgccctgggcgaccacttaggcttcgccgctgccaacatgaatgccatgatcttcc

SEQ ID NO: 891748 - DNA, 75 bp, synthetic construct
  source 1..75: mol_type = other DNA
agctgggcgactggcaccagttctaccgggagcattattttcaggacgctcagctcgatgcgcatttctcagagc

SEQ ID NO: 891749 - DNA, 75 bp, synthetic construct
  source 1..75: mol_type = other DNA
gcaacgctgctgttgaactggattatgatctgcctggcgcatctgcgttttcgtgctgcgatgcgacgtcagggg

SEQ ID NO: 891750 - DNA, 75 bp, synthetic construct
  source 1..75: mol_type = other DNA
ggcaagttgatcggcggcgtaacggcgattggcgtggcgatgatgctggtgccaaaagaagacgcgaccgcggct

SEQ ID NO: 891751 - DNA, 75 bp, synthetic construct
  source 1..75: mol_type = other DNA
gctgctgacccgctggtttgaaaagccgctgatgaacgtcggtaagctactgaatgtgaataatattgcggcggc

SEQ ID NO: 891752 - DNA, 75 bp, synthetic construct
  source 1..75: mol_type = other DNA
gacgcaacaggacaccatccgccagatggcgaaatacaaccgcctgctctcacagcgggtggcggcttatgcttc

SEQ ID NO: 891753 - DNA, 75 bp, synthetic construct
  source 1..75: mol_type = other DNA
tctggttgaagagacggaggccttcctgtgctctgcactggcacgtgccgaagaaaagatcgaagaagatgaacg

SEQ ID NO: 891754 - DNA, 75 bp, synthetic construct
  source 1..75: mol_type = other DNA
tggcggaggcggacaataacacagcggaaagagcgcttcgtgcagtctgtctcggaaagaaaaacgtgttcttcg

SEQ ID NO: 891755 - DNA, 75 bp, synthetic construct
  source 1..75: mol_type = other DNA
tggggcggcgtaactacatgttcttcggctctgatggtggaggcgagagtgcggcagtgatgtacagcctgatcg

SEQ ID NO: 891756 - DNA, 75 bp, synthetic construct
  source 1..75: mol_type = other DNA
acggtctggcggaggcggacaataacacagcggaaagagcgcttcgtgccgtctgtctcgggaaaaagaattaca

SEQ ID NO: 891757 - DNA, 75 bp, synthetic construct
  source 1..75: mol_type = other DNA
tcgagccggaaacgtggctacgccacgtgatcagtgtaatcaacacctggcctgccaaccgcgtgaaagagttgt

SEQ ID NO: 891758 - DNA, 75 bp, synthetic construct
  source 1..75: mol_type = other DNA
aactgtacgccatcgaggatgaaatacggggcttaccggagtctgaacgtcttgcagccaggcagcagcgaagca

SEQ ID NO: 891759 - DNA, 75 bp, synthetic construct
  source 1..75: mol_type = other DNA
ctctgggccgtctggctaaagaagccccgtctttccgtgtatggactgacgaagaatctaaccagaccatcatcg

SEQ ID NO: 891760 - DNA, 75 bp, synthetic construct
  source 1..75: mol_type = other DNA
aacttcggcagtcgttccgaaaaggtatcccgccgtatcgcacaaatggaagctgacctgaacctgctgcagcag

SEQ ID NO: 891761 - DNA, 75 bp, synthetic construct
  source 1..75: mol_type = other DNA
ccccgtatcttcggctggatggaccgtctttgcgaagactactgcggtggtatctggaatctgtacaccctgaac

SEQ ID NO: 891762 - DNA, 75 bp, synthetic construct
  source 1..75: mol_type = other DNA
gtccgatactggaagatctgtggtcatggcttgaagagcaggaaccgcaatgttctccgggaagtaagcgtacag

SEQ ID NO: 891763 - DNA, 75 bp, synthetic construct
  source 1..75: mol_type = other DNA
tagttgaagcgccagcgccgtcccgcccgatagcgcgcggcatcgcggactccggattacttgcccgcgtgttaa

SEQ ID NO: 891764 - DNA, 75 bp, synthetic construct
  source 1..75: mol_type = other DNA
aaagcctgtacaaaatgtgactgtatagttgaagcgccagcgccgtcccgcccgatagcgcgcggcatcgcgggc

SEQ ID NO: 891765 - DNA, 75 bp, synthetic construct
  source 1..75: mol_type = other DNA
cgcaaaaaccgaacggcagatacaggaagcacaggagcgaatcagcgcacttcaggaagaaatggcagaaacgct

SEQ ID NO: 891766 - DNA, 75 bp, synthetic construct
  source 1..75: mol_type = other DNA
atgcgggttcgtcatctcctccggcggtctggttcgcgtactcatcgaaccggcaggggaaacacccggagcaac

SEQ ID NO: 891767 - DNA, 75 bp, synthetic construct
  source 1..75: mol_type = other DNA
gtcagtctgggtcgtaaaaacttcctgttcttcggctctgaccatggtggtgagcggggagcgctactgtacagc

SEQ ID NO: 891768 - DNA, 75 bp, synthetic construct
  source 1..75: mol_type = other DNA
gtggccggcgctgacgtactatgcagatgatggctgggctgaggcggtggatttgcccctatatttccagacacc

SEQ ID NO: 891769 - DNA, 75 bp, synthetic construct
  source 1..75: mol_type = other DNA
gagagcgatacgctgactggtagggtgtatgacccggctgtacagcgtccgttgcgtcagacccgcacccgtaag

SEQ ID NO: 891770 - DNA, 75 bp, synthetic construct
  source 1..75: mol_type = other DNA
tccggggatgctcagcagaacagcgtctggcggcaagaaaagccagagctgcgccactgatgcagtcactgtatg

SEQ ID NO: 891771 - DNA, 75 bp, synthetic construct
  source 1..75: mol_type = other DNA
aagtggctgcgttacgtcattgaacatatccaggactggccggcaaaccgggtacgcgatctgttgccctggaaa

SEQ ID NO: 891772 - DNA, 75 bp, synthetic construct
  source 1..75: mol_type = other DNA
gttgcgtcagacccgctcccgtaagccgttccctgaatcactaccccgtgacgaaaagcgactgttgccggcggc

SEQ ID NO: 891773 - DNA, 75 bp, synthetic construct
  source 1..75: mol_type = other DNA
ccggaagaggaatgctgcccggcctgtggtggtgacctcagtcctctggggtgtgatgtgtcagagcaactggag

SEQ ID NO: 891774 - DNA, 75 bp, synthetic construct
  source 1..75: mol_type = other DNA
catcgctgaaaatgccctgcgggcggtcagtctgggtcgtaaaaacttcctgttcttcggctctgaccatggtgg

SEQ ID NO: 891775 - DNA, 75 bp, synthetic construct
  source 1..75: mol_type = other DNA
aaaatccagactgggcgaagcgttcagctatgtactgaatcagtgggacgccctctgttattacagtgatgacgg

SEQ ID NO: 891776 - DNA, 75 bp, synthetic construct
  source 1..75: mol_type = other DNA
atcgacaacaacatcgcagagaacgccttacggggagtggccgtaggccggaaaaactggatgttcgcgggttcc

SEQ ID NO: 891777 - DNA, 75 bp, synthetic construct
  source 1..75: mol_type = other DNA
gttgaagagacggaggtcttcctgcgctctgcactggcacgtgccgaagaaaagatcgaagaagatgagcgagaa

SEQ ID NO: 891778 - DNA, 75 bp, synthetic construct
  source 1..75: mol_type = other DNA
tggcggaggcggataataatgctgcggaaagagcgcttcgtgcagtctgtcttggaaagaaaaactttatgttct

SEQ ID NO: 891779 - DNA, 75 bp, synthetic construct
  source 1..75: mol_type = other DNA
tgcactggcacgtgccgaagaaaagatcgaagaagatgaacgggaaatagaacatctgcggactcagatagaaaa

SEQ ID NO: 891780 - DNA, 75 bp, synthetic construct
  source 1..75: mol_type = other DNA
tggcggagacggacaataacacagcggaaagagcgcttcgtgcagtctgtcttggaaagaaaaattacgtgttct

SEQ ID NO: 891781 - DNA, 75 bp, synthetic construct
  source 1..75: mol_type = other DNA
ttctggatcaattacgcgcgcagggcatcaaggatgaacaggtgctcaacgcgctcgccgccgtgccgcgtgaaa

SEQ ID NO: 891782 - DNA, 75 bp, synthetic construct
  source 1..75: mol_type = other DNA
atgaaaattatcacccgtggtgaagccatgcgtattcaccaacaacatccgacatcccgtctttttccgttctgt

SEQ ID NO: 891783 - DNA, 75 bp, synthetic construct
  source 1..75: mol_type = other DNA
ggagtaataccggttatttgatcaactggtatctcactgagatgaagcaactgctcggcgaggcgacggttgaat

SEQ ID NO: 891784 - DNA, 75 bp, synthetic construct
  source 1..75: mol_type = other DNA
cctgatgcgtctgccggagtggccggaggagcgactggcagagttgctgcctcttgagggatttaccttctccgg

SEQ ID NO: 891785 - DNA, 75 bp, synthetic construct
  source 1..75: mol_type = other DNA
cggctgtgggtctacgtccgtgatgaccgtaacgccggttcacagatgcccccggcggtctggttcgcgtacagc

SEQ ID NO: 891786 - DNA, 75 bp, synthetic construct
  source 1..75: mol_type = other DNA
cgcctggagccagaagaaagctgttgcccggagtgtggtggtgagctggattatctgggggaagtcagcgcagaa

SEQ ID NO: 891787 - DNA, 75 bp, synthetic construct
  source 1..75: mol_type = other DNA
tgcagaacgtgaaggtggtgcgctgacagaagttgcgtgctgggcccatgcccggcgaaaaatccacgatgtata

SEQ ID NO: 891788 - DNA, 75 bp, synthetic construct
  source 1..75: mol_type = other DNA
ctgtacagcctgatcgggacgtgcaaaatgaacggagtggagccagaaagctacctccgctatgcccttgacgtc

SEQ ID NO: 891789 - DNA, 75 bp, synthetic construct
  source 1..75: mol_type = other DNA
gcgtcactgtacagtcttatcgggacgtgcaaattaaacggcgtggatccggaacgctatctgcatcatgtactt

SEQ ID NO: 891790 - DNA, 75 bp, synthetic construct
  source 1..75: mol_type = other DNA
atgaaaaccatttcacataattccaccacatcttctgtttccgtaaccactgcatcagggaataaccagtctcaa

SEQ ID NO: 891791 - DNA, 75 bp, synthetic construct
  source 1..75: mol_type = other DNA
tggaccgtctgtgtgaagactactgcggtggtatctggaatctgtacaccctgaacaacggtggcgcatttatgg

SEQ ID NO: 891792 - DNA, 75 bp, synthetic construct
  source 1..75: mol_type = other DNA
gaagtgcgtgttccgcatcggggaaatgtggtggcgtgtttgaccggattgaggaaaagcgtgatgccatgcagt

SEQ ID NO: 891793 - DNA, 75 bp, synthetic construct
  source 1..75: mol_type = other DNA
cccgacgaacagcgtatctgcttctggccgcagtactttggctctatcccacaatggataacgctggaaccccgc

SEQ ID NO: 891794 - DNA, 75 bp, synthetic construct
  source 1..75: mol_type = other DNA
tatctgcgccatatcctgagcgtactgccggaatggccttccaaccgtgttgacgaactgctgccatggaacgta

SEQ ID NO: 891795 - DNA, 75 bp, synthetic construct
  source 1..75: mol_type = other DNA
aacatccggagcagcaccttcgccccttccggggtatcctgcaggcagatgcgtttaatggttacgatcggctgt

SEQ ID NO: 891796 - DNA, 75 bp, synthetic construct
  source 1..75: mol_type = other DNA
tgacctgcaacaactggttgccaccatagtccctgatgaacaacgcatcagcttctggccgcagcattttggcct

SEQ ID NO: 891797 - DNA, 75 bp, synthetic construct
  source 1..75: mol_type = other DNA
cacaaccacatcacacctgttttcacttttatcttccgtcttcagaggcatcacactatgaaaatcatcacccgt

SEQ ID NO: 891798 - DNA, 75 bp, synthetic construct
  source 1..75: mol_type = other DNA
gaacatctgcgggctcagatagaaaaactgcgccggatgctgttcggtacccgttctgaaaaactgcagtcgtga

SEQ ID NO: 891799 - DNA, 75 bp, synthetic construct
  source 1..75: mol_type = other DNA
ccatgcgtattcaccaacaacatccgacatcccgtctttttccgttctgtaccggtaagtaccgctggcacggta

SEQ ID NO: 891800 - DNA, 75 bp, synthetic construct
  source 1..75: mol_type = other DNA
tgaagtgcaggatattcccggtgtgctggccgtgtttgctgaacgccgtaaggacagttttggtccgtatgtccg

SEQ ID NO: 891801 - DNA, 75 bp, synthetic construct
  source 1..75: mol_type = other DNA
ttgccgaacatggtctgctttaacccgtcaccgtcacaatcaccttcatatcacttcagtttctctttctcagct

SEQ ID NO: 891802 - DNA, 75 bp, synthetic construct
  source 1..75: mol_type = other DNA
gaagccatgcgtattcaccaacaacatccgacatcccgtctttttccgttctgtaccggcaaataccgctggcac

SEQ ID NO: 891803 - DNA, 75 bp, synthetic construct
  source 1..75: mol_type = other DNA
tgccgtctgtctcgggaaaaagaattcttatgacctttgtcaaatattaagtccaaaaagacctcttatgacctt

SEQ ID NO: 891804 - DNA, 75 bp, synthetic construct
  source 1..75: mol_type = other DNA
gtgaggatgacccgcaggttccccgccagttgcgacagtcacgtcatcgtcgtccgttaccagcacatcttcccc

SEQ ID NO: 891805 - DNA, 75 bp, synthetic construct
  source 1..75: mol_type = other DNA
atgcccgcctgcgggcactgttgcagacacaacaggacaccatccgccagatggctgaatacaaccgcctgctct

SEQ ID NO: 891806 - DNA, 75 bp, synthetic construct
  source 1..75: mol_type = other DNA
cattccacagtgggttaccctggacccccgtgtcttcggctggatggaccgtctgtgcgaaaactactgcggtgg

SEQ ID NO: 891807 - DNA, 75 bp, synthetic construct
  source 1..75: mol_type = other DNA
cattccacagtgggtaaccctggacccccgtgtcttcggctggatggaccgtctttgcgaaaactactgcggtgg

SEQ ID NO: 891808 - DNA, 75 bp, synthetic construct
  source 1..75: mol_type = other DNA
tcgtacggagtgttatgccatgacggtccattattaccggctgcgggattacgccctgcagcatccggaatgcag

SEQ ID NO: 891809 - DNA, 75 bp, synthetic construct
  source 1..75: mol_type = other DNA
cccgtgaaatataccgcctggagcctgaagaaagctgttgcccggagtgtggcggtgagctggattatctggggg

SEQ ID NO: 891810 - DNA, 75 bp, synthetic construct
  source 1..75: mol_type = other DNA
gtctggttcgcgtactcaccggaccggaaaggtatcccccatccacaaaatcatctggccggttgcagcggtgtg

SEQ ID NO: 891811 - DNA, 75 bp, synthetic construct
  source 1..75: mol_type = other DNA
tgccatcgaggcagaagtccggggatgttcagcagaaccgcgtctggcggcaagaaaagccagagccgtgccact

SEQ ID NO: 891812 - DNA, 75 bp, synthetic construct
  source 1..75: mol_type = other DNA
actgctggaaccgctgtatgacatcctgcgccagtatgtgctgatgcccggtaaagtccatgccgatgatatccc

SEQ ID NO: 891813 - DNA, 75 bp, synthetic construct
  source 1..75: mol_type = other DNA
ccgagctgcgccactgatgcagtcactgtatgactggatacagactcagatgaaaacactgtctcgtcactcgga

SEQ ID NO: 891814 - DNA, 75 bp, synthetic construct
  source 1..75: mol_type = other DNA
aagagacggaagccttcctgcgctctgcactgacacgtgccgaagaaaagatcgaagatgaaccgccccgggttt

SEQ ID NO: 891815 - DNA, 75 bp, synthetic construct
  source 1..75: mol_type = other DNA
cattccacagtgggtgaccctggatccccgtgtcttcggctggatggaccgtctctgcgaaaactactgcggtgg

SEQ ID NO: 891816 - DNA, 75 bp, synthetic construct
  source 1..75: mol_type = other DNA
atgagtcagaaatacctcattcgcatcgcagagctggaaaggttgctctctgagcaggatgaagccctccgtcag

SEQ ID NO: 891817 - DNA, 75 bp, synthetic construct
  source 1..75: mol_type = other DNA
catcacgcctgtcgtacagagaattatgccatgacggttcattattaccgtctacgggattacgccctgcagcat

SEQ ID NO: 891818 - DNA, 75 bp, synthetic construct
  source 1..75: mol_type = other DNA
cggtggtatctggaatctgtacacactgaataacggcggcgcatttatggcgcccgaaccggatgatgatgacga

SEQ ID NO: 891819 - DNA, 75 bp, synthetic construct
  source 1..75: mol_type = other DNA
actttgaccgccagattattattccgcccattatttttaacggtatagcgtatgacgatccggggagcggaaata

SEQ ID NO: 891820 - DNA, 75 bp, synthetic construct
  source 1..75: mol_type = other DNA
ggcggtcagtctggatcgtaaaaacttcctgttcttcggctctgaccatggtggtgagcggggagcgctactgta

SEQ ID NO: 891821 - DNA, 75 bp, synthetic construct
  source 1..75: mol_type = other DNA
actcgccgaaccggcaggggaaacacccgacatccactcccagggcactgcaccacgcctgtttaatcatcccgg

SEQ ID NO: 891822 - DNA, 75 bp, synthetic construct
  source 1..75: mol_type = other DNA
aagtgttactgacgtcgctgcatgaatggatcgtggagaagaatggtacgctgtcgaaaaaatccagactgggcg

SEQ ID NO: 891823 - DNA, 75 bp, synthetic construct
  source 1..75: mol_type = other DNA
gtcatcatgcctgtcgtacggagtgttatgccatgacggtccattattaccggctgcgggattacgccctgcagc

SEQ ID NO: 891824 - DNA, 75 bp, synthetic construct
  source 1..75: mol_type = other DNA
tgatgacgaaacatggggactgttcaatgccatgaacggcaaccgcgctgaaatgagcccggaagccgccggtat

SEQ ID NO: 891825 - DNA, 75 bp, synthetic construct
  source 1..75: mol_type = other DNA
ccggaatgcagcgccattatgcgcatcatgactgaatggagagaagcacaatgcaacaactttcctttctgcccg

SEQ ID NO: 891826 - DNA, 75 bp, synthetic construct
  source 1..75: mol_type = other DNA
gcccgccagggtgtcgaactgagccgggccttactctccaactgggttgatgcgtgctgccagttaatgacaccg

SEQ ID NO: 891827 - DNA, 75 bp, synthetic construct
  source 1..75: mol_type = other DNA
cgtgaagtgcaggatattcccggtgtgctggccgtgtttgcagaacgccgtaaggacagttttggcccgtatgtc

SEQ ID NO: 891828 - DNA, 75 bp, synthetic construct
  source 1..75: mol_type = other DNA
tggcgcagagcttaccagtgaagctgccgggatggtcgcctgtctgatgacttacaatcaccacgcctgtcgcac

SEQ ID NO: 891829 - DNA, 75 bp, synthetic construct
  source 1..75: mol_type = other DNA
ctgatcggcacctgccgtctgaacggtatcgatccggaagcgtatctgcgccatatcctgagcgtactgccagaa

SEQ ID NO: 891830 - DNA, 75 bp, synthetic construct
  source 1..75: mol_type = other DNA
agtgaaatctttgcccgacagggtgtcgaactgagccgtgcattactctccaactgggttgacgcgtgctgccag

SEQ ID NO: 891831 - DNA, 75 bp, synthetic construct
  source 1..75: mol_type = other DNA
aatgccatgaacggtaaccgcgctgaaatgagtccggaagccgccggcattgccgcctgtctgatgacgtacagt

SEQ ID NO: 891832 - DNA, 75 bp, synthetic construct
  source 1..75: mol_type = other DNA
atctggaatctgtacaccctgaacaacggtggcgcatttatagcacccgaaccggatgaagatgatggaaaaacc

SEQ ID NO: 891833 - DNA, 75 bp, synthetic construct
  source 1..75: mol_type = other DNA
tcagaaatatatcgtcgtcagggagtggagctgagccgtgccacactggggcgctggacaggtgctgttgctgaa

SEQ ID NO: 891834 - DNA, 75 bp, synthetic construct
  source 1..75: mol_type = other DNA
cgggacaatactgcgaacacctgccactgtatcgtcagagtgaaatctttgcccgacagggtgccgaactgagcc

SEQ ID NO: 891835 - DNA, 75 bp, synthetic construct
  source 1..75: mol_type = other DNA
tgacgtcgctgcatgaatggatggtggagaagaatggcacgctgtcgaaaaaatccagactgggcgaagcgttca

SEQ ID NO: 891836 - DNA, 75 bp, synthetic construct
  source 1..75: mol_type = other DNA
tgcatcagggaatgaccagcctcagttggttgccactcccgtccctgatgaacagcgcatcagcttctggccgca

SEQ ID NO: 891837 - DNA, 75 bp, synthetic construct
  source 1..75: mol_type = other DNA
caccggtaaaggtactggcaccgggtcagaaaaaggcgaaaacagggcgtatctggacgtatgtccgggatgatc

SEQ ID NO: 891838 - DNA, 75 bp, synthetic construct
  source 1..75: mol_type = other DNA
gacggtaaagatactccggctgaacgtcacgcaagtgatgacgagccgttctctgctctggcgttcaaaatcgct

SEQ ID NO: 891839 - DNA, 75 bp, synthetic construct
  source 1..75: mol_type = other DNA
aaaaactttatgttctttggcagcgatcacggcggcgagcgtggagcactgttgtacgggctgatcggcacctgc

SEQ ID NO: 891840 - DNA, 75 bp, synthetic construct
  source 1..75: mol_type = other DNA
tgttatgccatgacggtccattattaccggttgcgggattacgccctgcagcatccggaatgcagcgccattatg

SEQ ID NO: 891841 - DNA, 75 bp, synthetic construct
  source 1..75: mol_type = other DNA
gtgtgacgcgatgactgaacactattatctcttacgcgactacgcgctgaaccatccggagtgcagcgacattat

SEQ ID NO: 891842 - DNA, 75 bp, synthetic construct
  source 1..75: mol_type = other DNA
ctgagcaggcagcaattactgcctcggtggtccctgacgagttacgcataggcttctggccacagcactttggct

SEQ ID NO: 891843 - DNA, 75 bp, synthetic construct
  source 1..75: mol_type = other DNA
aaaacagggcgcatctggacgtatgtccgggatgatcgcaatgcgggttcgtcatctcctccggcggtctggttc

SEQ ID NO: 891844 - DNA, 75 bp, synthetic construct
  source 1..75: mol_type = other DNA
gagcatatccaggactggccggcaaaccgggtacgcgatctgttgccctggaaagttgatctgagctctcagtaa

SEQ ID NO: 891845 - DNA, 75 bp, synthetic construct
  source 1..75: mol_type = other DNA
tcgctgatcggcacatgccgtctgaacaatgtggagccagaaaagtggctgcgttacgtcattgaacatatctag

SEQ ID NO: 891846 - DNA, 75 bp, synthetic construct
  source 1..75: mol_type = other DNA
atgagtccggaagccgccggcattgcggcctgtctgatgacgtacagtcatcacgcctgtcgtacggagtgttat

SEQ ID NO: 891847 - DNA, 75 bp, synthetic construct
  source 1..75: mol_type = other DNA
atgcccgtaaagtccatgctgatgatatccccgacccggtccaggagaccgggcagcggtaaaaccggacagccc

SEQ ID NO: 891848 - DNA, 75 bp, synthetic construct
  source 1..75: mol_type = other DNA
cgttccgacagtggcggcgaacatgcggcggcactgtattcacagatcggcacgtgccgtctggacaatgtggag

SEQ ID NO: 891849 - DNA, 75 bp, synthetic construct
  source 1..75: mol_type = other DNA
catcaacaccgcgttcagggtaatcgaaacggttcgcccaaaactggcctgcagtcggtgcgactgtatagttca

SEQ ID NO: 891850 - DNA, 75 bp, synthetic construct
  source 1..75: mol_type = other DNA
cggtatcgatccggaagcgtatctgcgccttatcctgagcgtactgccggaatggccttccaaccgagttgatga

SEQ ID NO: 891851 - DNA, 75 bp, synthetic construct
  source 1..75: mol_type = other DNA
atggtggagaagaatggcacgctgtcgaaaaaatccagaccaggcgaagcgttcagctatgtactgaatcagtgg

SEQ ID NO: 891852 - DNA, 75 bp, synthetic construct
  source 1..75: mol_type = other DNA
tgacggtccattattaccggttgcgggattacgccctgcagcatccggaatacgacgccattatgcgcattattg

SEQ ID NO: 891853 - DNA, 75 bp, synthetic construct
  source 1..75: mol_type = other DNA
aatacaacaaaccagggcaaccctgtacagcttatctatggcgaggaaattttagttggctcgcaagttgtaagt

SEQ ID NO: 891854 - DNA, 75 bp, synthetic construct
  source 1..75: mol_type = other DNA
ttataacagtgtgtcatattttatttatgtttttcgaaattactatgggctgacaccgacagagtatcaggaacg

SEQ ID NO: 891855 - DNA, 75 bp, synthetic construct
  source 1..75: mol_type = other DNA
accggtaaataccgctggcacggtagcacggatacatataccggccgtgaagtacaggatattccctgtgtgctg

SEQ ID NO: 891856 - DNA, 75 bp, synthetic construct
  source 1..75: mol_type = other DNA
tggaccgtctgtgcgaagactactgcggaggcatctggaatctgtacaccctgaacaacgggggagcatttatgg

SEQ ID NO: 891857 - DNA, 75 bp, synthetic construct
  source 1..75: mol_type = other DNA
tggaccgtctgtgcgaagactactgcggaggtatctggaatctgtacaccctgaacaacggcggtgcatttatgg

SEQ ID NO: 891858 - DNA, 75 bp, synthetic construct
  source 1..75: mol_type = other DNA
tggaccgtctgtgcgaagactactgcggaggaatctggaatctgtacaccctgaacaacgggggcgcatttatgg

SEQ ID NO: 891859 - DNA, 75 bp, synthetic construct
  source 1..75: mol_type = other DNA
ccggaagccgccggcattgccgcctgtctgatgacgtacagtcatcacgcctgccgtacggagtgttatgccatg

SEQ ID NO: 891860 - DNA, 75 bp, synthetic construct
  source 1..75: mol_type = other DNA
ctggttgccactcccgtccctgatgaacaacgtatcagcttctggccgcagcattttggcctcattccacagtgg

SEQ ID NO: 891861 - DNA, 75 bp, synthetic construct
  source 1..75: mol_type = other DNA
gaacggtaaccgcgctgaaatgagcccggaagccgccggcattgccgcctgtctgatgacgtacagtcatcacgc

SEQ ID NO: 891862 - DNA, 75 bp, synthetic construct
  source 1..75: mol_type = other DNA
ccaaaagcaagggtaatcatcgtcacggatgcagggttccagaatgcctggtttcggcacataaaatcactcggc

SEQ ID NO: 891863 - DNA, 75 bp, synthetic construct
  source 1..75: mol_type = other DNA
aaatgagcccggaagccgccggcattgcagcctgtctgatgacgtacagccatcatgcctgtcgtacggagtgtt

SEQ ID NO: 891864 - DNA, 75 bp, synthetic construct
  source 1..75: mol_type = other DNA
gggtgaccctggagccccgtatcttcggctggatggaccgtctgtgcgaaaactactgcggtggtatctggaatc

SEQ ID NO: 891865 - DNA, 75 bp, synthetic construct
  source 1..75: mol_type = other DNA
tggaccgtctgtgcgaagactactgcggagggatctggaatctgtacaccctgaacaacggaggggcatttatgg

SEQ ID NO: 891866 - DNA, 75 bp, synthetic construct
  source 1..75: mol_type = other DNA
ctcttgcgcctctcggtttgtcactgatgatgggcggtatagcgcaaatcatatctccacaagccactaacgaaa

SEQ ID NO: 891867 - DNA, 75 bp, synthetic construct
  source 1..75: mol_type = other DNA
ctggttgccaccctcgtccctgatgaacagcgcatcagcttctggccgcagcactttggcctcattccacagtgg

SEQ ID NO: 891868 - DNA, 75 bp, synthetic construct
  source 1..75: mol_type = other DNA
gcatcagcttctggccgcagcagtttggcctcattccacagtgggtcaccctggagccccgtgtcttcggctgga

SEQ ID NO: 891869 - DNA, 75 bp, synthetic construct
  source 1..75: mol_type = other DNA
aagcctcggttagcgatctgaccggtgaacagcctgcggcacagccagcgcctgtaagcaccccggcagcaacca

SEQ ID NO: 891870 - DNA, 75 bp, synthetic construct
  source 1..75: mol_type = other DNA
gaagagtgcaggtcgtttaactcagaggttatcaagcgcctgatagacagcctgaagagagagggggtagtggta

SEQ ID NO: 891871 - DNA, 75 bp, synthetic construct
  source 1..75: mol_type = other DNA
catggatggttgtggatgtttatggctctggctggcagtgtaattgggataaatcttcggagattttttatttgt

SEQ ID NO: 891872 - DNA, 75 bp, synthetic construct
  source 1..75: mol_type = other DNA
gcatcagcttctggccgcagcactttggcctcattccacagtgggtaaccctggaaccccgtgtcttcggctgga

SEQ ID NO: 891873 - DNA, 75 bp, synthetic construct
  source 1..75: mol_type = other DNA
gcatcagcttctggccgcagcaatttggcctcattccacagtgggtcaccctggaaccccgtgtcttcggctgga

SEQ ID NO: 891874 - DNA, 75 bp, synthetic construct
  source 1..75: mol_type = other DNA
atgaatggtaaccgcgctgaaatgggcccggaagctgctggtattgccgcctgtctgatgacgtacagccatcac

SEQ ID NO: 891875 - DNA, 75 bp, synthetic construct
  source 1..75: mol_type = other DNA
gcatcagcttctggccgcagcactttggcctcattccacagtgggtgaccctggagccccgtgtcttcggctgga

SEQ ID NO: 891876 - DNA, 75 bp, synthetic construct
  source 1..75: mol_type = other DNA
gcatcagcttctggccgcagcactttggcctcattccacagtgggtcaccctggacccccgtgtcttcggctgga

SEQ ID NO: 891877 - DNA, 75 bp, synthetic construct
  source 1..75: mol_type = other DNA
gcatcagcttctggccgcagcactttggcctcattccacagtgggttaccctggatccccgtgtcttcggctgga

SEQ ID NO: 891878 - DNA, 75 bp, synthetic construct
  source 1..75: mol_type = other DNA
ttctattgtatttttcatgggtataatgtagcgagtattgcttatcagtttggtataagttcaaagactgtgtat

SEQ ID NO: 891879 - DNA, 75 bp, synthetic construct
  source 1..75: mol_type = other DNA
aatcaactgttcgcccgcacacatgcgatgatggttcgtgaacgacgctttacctccgacgcagctcacgaactt

SEQ ID NO: 891880 - DNA, 75 bp, synthetic construct
  source 1..75: mol_type = other DNA
atgaaatccatggacaagttaacaacgggcattgcctacggcacctccgcaggcagtgctggctactggttttta

SEQ ID NO: 891881 - DNA, 75 bp, synthetic construct
  source 1..75: mol_type = other DNA
atggaaaaaattacaacaggtgtgtcatacaccacgtcagcggtggggacgggatactggttactgcagctgctg

SEQ ID NO: 891882 - DNA, 75 bp, synthetic construct
  source 1..75: mol_type = other DNA
cttaaagatatttttgctaaatgctggaagttattacctgaaaattcagagcaacgacagaaagcaagcgacgta

SEQ ID NO: 891883 - DNA, 75 bp, synthetic construct
  source 1..75: mol_type = other DNA
gcaataggtgtgctgggtagcctggtatttggcctgctgacgtacctgacaaacctttatttcaagattaaagaa

SEQ ID NO: 891884 - DNA, 75 bp, synthetic construct
  source 1..75: mol_type = other DNA
ctgttgctaagtttgttggtacgaaaccttctggataacgccgtgcgctacagtccacagggcagcgtggtggac

SEQ ID NO: 891885 - DNA, 75 bp, synthetic construct
  source 1..75: mol_type = other DNA
ctcagtgggcggcaataggcgtgctggggagtctgctgtttgggctgctgacatatctgactgaggtgtactggc

SEQ ID NO: 891886 - DNA, 75 bp, synthetic construct
  source 1..75: mol_type = other DNA
gggaagtctgctgtttgggctgctgacatatctgactaacctgtatttcaaaatcagagaggaccgtcgtaaggc

SEQ ID NO: 891887 - DNA, 75 bp, synthetic construct
  source 1..75: mol_type = other DNA
cgggcattgcctacggcacctccgccggcagtgccggctactggtttttgcagtggttggagcaggtcagtccat

SEQ ID NO: 891888 - DNA, 75 bp, synthetic construct
  source 1..75: mol_type = other DNA
ggggagtctgctgtttgggctgctgacatacctgactaacctgtatttcaagattaaagaagaccgtcgtaaggc

SEQ ID NO: 891889 - DNA, 75 bp, synthetic construct
  source 1..75: mol_type = other DNA
ggggagtctgctgtttggtctgctgacgtacctgacgaacctgtatttcaaaattaaagaggaccggcgcagggc

SEQ ID NO: 891890 - DNA, 75 bp, synthetic construct
  source 1..75: mol_type = other DNA
atgtaccagatggaaaaaatcacacagggtgtcatacaccacgtcagcggtgggaacgggctactggttcctgca

SEQ ID NO: 891891 - DNA, 75 bp, synthetic construct
  source 1..75: mol_type = other DNA
ccgatggtctatgccgctgcgttctccggcttctatgtcgcgatgatcctcgtactggcgtctttgttcttccgt

SEQ ID NO: 891892 - DNA, 75 bp, synthetic construct
  source 1..75: mol_type = other DNA
ctaatacgaaagccgatgatataaatgcgcagatcactgaacttaaagctctctggggatggctggatgacgtaa

SEQ ID NO: 891893 - DNA, 75 bp, synthetic construct
  source 1..75: mol_type = other DNA
tgatttctctgttctggatgagaaagatagtaaagtgtctcgctatttcctcatgaatgatgctgtagaaggcaa

SEQ ID NO: 891894 - DNA, 75 bp, synthetic construct
  source 1..75: mol_type = other DNA
tgccgcctgtctgatgacgtacagtcatcatgcctgtcgtacggagtgttatgccatgacggtccattattaccg

SEQ ID NO: 891895 - DNA, 75 bp, synthetic construct
  source 1..75: mol_type = other DNA
agaaaaataaaattaatggcgtgaaaaacattattataatatcatcccctaagacgtcagatattttttattttt

SEQ ID NO: 891896 - DNA, 75 bp, synthetic construct
  source 1..75: mol_type = other DNA
aagcaccaaagtggaacataaggagataatgttgcccggttgcagtgaggatgttggtggtgggctgaaacccga

SEQ ID NO: 891897 - DNA, 75 bp, synthetic construct
  source 1..75: mol_type = other DNA
tatacgccgtatggcagaatctccaaaaccagaggaaaaaccggataaaaataaaatattggaatatctaaacat

SEQ ID NO: 891898 - DNA, 75 bp, synthetic construct
  source 1..75: mol_type = other DNA
gtaacttcttccagttgcttaacccgttcggcctgctggcaggcgtggtgagcgtagggatgatcattactcagg

SEQ ID NO: 891899 - DNA, 75 bp, synthetic construct
  source 1..75: mol_type = other DNA
acgtcatcgtcgtccgttaccggcacaccttccccgtgaaatacaccgcctggagccagaagaaagctgttgccc

SEQ ID NO: 891900 - DNA, 75 bp, synthetic construct
  source 1..75: mol_type = other DNA
agcgtagggatgatcattactcagggcgcaacctatctgcaaatgcgtaccgtgggcgaactgcacctgcgtacc

SEQ ID NO: 891901 - DNA, 75 bp, synthetic construct
  source 1..75: mol_type = other DNA
actgcgccggatgctgttcggtacctgttctgaaaaactgcgtcgtgaagttgaacaggctgaggccctgctgaa

SEQ ID NO: 891902 - DNA, 75 bp, synthetic construct
  source 1..75: mol_type = other DNA
caatggaccattacgcagcatctaacccgctgaataaagaagttgttcgtgaagctggcgcatggctggtgaact

SEQ ID NO: 891903 - DNA, 75 bp, synthetic construct
  source 1..75: mol_type = other DNA
gctgatgcaggagaaagaacacacgttatcgaaaaaatgccgtctgagagatgcgttccggtatatcaggaagca

SEQ ID NO: 891904 - DNA, 75 bp, synthetic construct
  source 1..75: mol_type = other DNA
gtatctggaatctgtacacactgaacaacggcggggcatttatggcacccgaaccggatgacgatgatggcgaaa

SEQ ID NO: 891905 - DNA, 75 bp, synthetic construct
  source 1..75: mol_type = other DNA
cgtcgaatcgacgctacgcgacggcttttttctggagtatttcggcgtggtgctggaagacgcaacacaccaggc

SEQ ID NO: 891906 - DNA, 75 bp, synthetic construct
  source 1..75: mol_type = other DNA
ttttgcccgtcagggtgtcgaactgagccgtgcattactctccaacttggttgacgcgtgctgccagttaatgac

SEQ ID NO: 891907 - DNA, 75 bp, synthetic construct
  source 1..75: mol_type = other DNA
gtatctggaatctgtacaccctgaacaacggcggggcatttatggcccccgaaccggatgacgatgatggcgaaa

SEQ ID NO: 891908 - DNA, 75 bp, synthetic construct
  source 1..75: mol_type = other DNA
gtatctggaatctgtacactctgaacaacggcggggcatttatggctcccgaaccggatgacgatgatggcgaaa

SEQ ID NO: 891909 - DNA, 75 bp, synthetic construct
  source 1..75: mol_type = other DNA
gtatctggaatctgtacacactgaacaacggcggggcatttatggcgcccgaaccggatgacgatgatgacgaaa

SEQ ID NO: 891910 - DNA, 75 bp, synthetic construct
  source 1..75: mol_type = other DNA
gccagcctcgtccctgatgaacagcgcatcagcttctggccgcagcattttggcctcattccactgtgggtgacc

SEQ ID NO: 891911 - DNA, 75 bp, synthetic construct
  source 1..75: mol_type = other DNA
accgccagtcagaaatataccgtcgtcagggtgtagaggtgagccgcgccacgctggggcgctggaccagtgctg

SEQ ID NO: 891912 - DNA, 75 bp, synthetic construct
  source 1..75: mol_type = other DNA
acagcgatcgttacagtgggcgggaagacgatcctcaggttccccgccagttgcgacagtcacgccatcgtcgtc

SEQ ID NO: 891913 - DNA, 75 bp, synthetic construct
  source 1..75: mol_type = other DNA
gccaatattcaaaccgctgtgaccgcggcacgggcggcaggcatgttgatcatctggtttcagaatggctgggat

SEQ ID NO: 891914 - DNA, 75 bp, synthetic construct
  source 1..75: mol_type = other DNA
tgacggttcattattaccgtctgcgggattacgccctgcaacatccggaatacgacgccattatgcgcatcattg

SEQ ID NO: 891915 - DNA, 75 bp, synthetic construct
  source 1..75: mol_type = other DNA
ttggttgccactcccgtccctgatgaacaacgcatcagcttctggccgcagcattttggcctcattccacagtgg

SEQ ID NO: 891916 - DNA, 75 bp, synthetic construct
  source 1..75: mol_type = other DNA
gtatctggaatctgtacaccctgaacaacggcggggcatttatggcgcccgaaccggatgacgatgatgccgaaa

SEQ ID NO: 891917 - DNA, 75 bp, synthetic construct
  source 1..75: mol_type = other DNA
caatggaccattacgcggcatctaacccgctgaataaagaagtggttcgtgaagctggcgcatggttggtgaact

SEQ ID NO: 891918 - DNA, 75 bp, synthetic construct
  source 1..75: mol_type = other DNA
tgaaaacactagtcgcgtcactcagatacggcaaaagcgttcgcatacctgctgaaacagtgggatgcactgaac

SEQ ID NO: 891919 - DNA, 75 bp, synthetic construct
  source 1..75: mol_type = other DNA
gtgttgtactcgctgatcggcacatgccgtctgaacaatgtggagccagaaaaatggctgcgctacgtcattgaa

SEQ ID NO: 891920 - DNA, 75 bp, synthetic construct
  source 1..75: mol_type = other DNA
gcccgccagggcatcgaactgagccgggcattactctccaactgggttgacgcatattgtcagttaatgactctg

SEQ ID NO: 891921 - DNA, 75 bp, synthetic construct
  source 1..75: mol_type = other DNA
ttatctgggggaagtcagcgctgaacagctggaactggtgagcagtgccctgaaagtgatccgcacagaacgggt

SEQ ID NO: 891922 - DNA, 75 bp, synthetic construct
  source 1..75: mol_type = other DNA
tttgcccgccagggcatcgaactgagccgggcattactctccaactgggttgacgcatgttgtcagttaatgact

SEQ ID NO: 891923 - DNA, 75 bp, synthetic construct
  source 1..75: mol_type = other DNA
gatcatctggtttcaaaatggctgggatgaacagtatgtcgaagctggcggccccggctcaccgaattttcataa

SEQ ID NO: 891924 - DNA, 75 bp, synthetic construct
  source 1..75: mol_type = other DNA
tgtactgcagtaatggccaggtggaaatcgacaacaacatcgcagagaacgccttacggggagtggccgtaggcc

SEQ ID NO: 891925 - DNA, 75 bp, synthetic construct
  source 1..75: mol_type = other DNA
gtatctggaatctgtacacgctgaacaacggcggggcatttatggcgcccgaaccggatgacgatgatggcgaaa

SEQ ID NO: 891926 - DNA, 75 bp, synthetic construct
  source 1..75: mol_type = other DNA
tgtactgcagtaatggctgggtggaaatcgacaacaacatcgcagagaacgccttacggggtgtggccgtgggcc

SEQ ID NO: 891927 - DNA, 75 bp, synthetic construct
  source 1..75: mol_type = other DNA
cgccggttcacagatgcccccggcggtctggttcgcgtacagcccggaccggaaaggtatccatccacagaatca

SEQ ID NO: 891928 - DNA, 75 bp, synthetic construct
  source 1..75: mol_type = other DNA
cccggctgtgggtctacgtccgtgatgaccgtaacgccggttcacagatgcccccggcggtctggttcgcgtaca

SEQ ID NO: 891929 - DNA, 75 bp, synthetic construct
  source 1..75: mol_type = other DNA
tcactgagctggaaaggctactctctgagccggctgaagccctccgtcagaaagatcagcaactgagtctggttg

SEQ ID NO: 891930 - DNA, 75 bp, synthetic construct
  source 1..75: mol_type = other DNA
cccgatagagcgcggtatcgcgggccccggattacttgcccgcgtgtttacgggaaaatactgcgaacacctgcc

SEQ ID NO: 891931 - DNA, 75 bp, synthetic construct
  source 1..75: mol_type = other DNA
ctggctgtgtttgcagaacgccgtaaggacagttttggcccgtatgtccggctgatgagtgtcaccctgaactga

SEQ ID NO: 891932 - DNA, 75 bp, synthetic construct
  source 1..75: mol_type = other DNA
acgacggcagaagaagctctgaagcgcatcagtgaactgtacgccattgaggatgaaatacggggcttaccggag

SEQ ID NO: 891933 - DNA, 75 bp, synthetic construct
  source 1..75: mol_type = other DNA
gtcagtgctgagcagctggaactggtgagtagcgccctgaaagtgatccgcactgttcgggtaaaaaaagcctgt

SEQ ID NO: 891934 - DNA, 75 bp, synthetic construct
  source 1..75: mol_type = other DNA
ccatgacggtccattattaccggttgcgggattacgccctgcagcatccggaatgcagcgccattatgcgcatta

SEQ ID NO: 891935 - DNA, 75 bp, synthetic construct
  source 1..75: mol_type = other DNA
caatatctgttacttcgcgctatcgccagaagatgaagcgcgcgatgcagcgcgtcatattcgtgaccagggtaa

SEQ ID NO: 891936 - DNA, 75 bp, synthetic construct
  source 1..75: mol_type = other DNA
gcccgccagggtgtcgaactgagccgtgccttactctccaactgggttgatgcgtgctgccagttaataactccg

SEQ ID NO: 891937 - DNA, 75 bp, synthetic construct
  source 1..75: mol_type = other DNA
tgccggacgtgaaggcggcgcgttgacggaagcaggatgctgggctcatgcgcgacgcaaaatccacgatgtata

SEQ ID NO: 891938 - DNA, 75 bp, synthetic construct
  source 1..75: mol_type = other DNA
agatggaaggattacagtacagcgagatcccgatgttggcaggcggtaatctaccgttaatgcagcaggcactaa

SEQ ID NO: 891939 - DNA, 75 bp, synthetic construct
  source 1..75: mol_type = other DNA
ggcggataataatgctgcggaaagagcgcttcgtgcagtctgtctcggaaagaaaaactttatgttctttggcag

SEQ ID NO: 891940 - DNA, 75 bp, synthetic construct
  source 1..75: mol_type = other DNA
tgctgtacgggctgatcggcacctgccgtctgaacggtatcgatccggaagcgtatctgcgccatattctgagcg

SEQ ID NO: 891941 - DNA, 75 bp, synthetic construct
  source 1..75: mol_type = other DNA
acgttatcgaagaaatgtcgtctgggagatgcgttccggtatatcaggaagcactgggctgcgttgtgcaacttc

SEQ ID NO: 891942 - DNA, 75 bp, synthetic construct
  source 1..75: mol_type = other DNA
ctgaatgatgccctgtaccgttacgtgatgaacacccgcaaggttcacactgacgacataccagtaaaagtgctg

SEQ ID NO: 891943 - DNA, 75 bp, synthetic construct
  source 1..75: mol_type = other DNA
cattccacagtgggtgcccctggagccccgtatcttcggctggatggaccgtctttgcgaagactactgcggtgg

SEQ ID NO: 891944 - DNA, 75 bp, synthetic construct
  source 1..75: mol_type = other DNA
gaacatgcggcggtgttgtactcgctgatcggcacatgccgtctgaacaatgtggagccagaaaagtggctgcgt

SEQ ID NO: 891945 - DNA, 75 bp, synthetic construct
  source 1..75: mol_type = other DNA
ttcgcgggttccgacagcggtggtgaacatgcggcggtgttgtactcgctgatcggcacatgccgtctgaacaat

SEQ ID NO: 891946 - DNA, 75 bp, synthetic construct
  source 1..75: mol_type = other DNA
ttgctgaactgctggagccgttgtatgacgtcctgcgccagtatgtgctgatgcccggtaaagtccatgccgatg

SEQ ID NO: 891947 - DNA, 75 bp, synthetic construct
  source 1..75: mol_type = other DNA
tttaaaccagcctcgaccaacaaaatcgccctgctgttgccgctgaatggccaggcagcggtatttggtcgcact

SEQ ID NO: 891948 - DNA, 75 bp, synthetic construct
  source 1..75: mol_type = other DNA
cgcgccatattcatgaccagggcaaacaagcgccgctggtgctgatcccgcggagttcactgggcgatcgcgtgg

SEQ ID NO: 891949 - DNA, 75 bp, synthetic construct
  source 1..75: mol_type = other DNA
cctgagtgtactgccggaatggccttccaaccgtgttgacgagctcctgccatggaacgtagcactcaccaataa

SEQ ID NO: 891950 - DNA, 75 bp, synthetic construct
  source 1..75: mol_type = other DNA
taaaacccggacagcccggctgtgggtctacgtccgtgatgaccgcaacgccggttcacagatgcccccggcggt

SEQ ID NO: 891951 - DNA, 75 bp, synthetic construct
  source 1..75: mol_type = other DNA
tgacccagcagcaggcgaatacgctggtgatcaacgccgacgaaaacatcctacaaggctggctggatctgcaac

SEQ ID NO: 891952 - DNA, 75 bp, synthetic construct
  source 1..75: mol_type = other DNA
catcgcagagaacgccttacggggagtggccgtaggccggaaaactggctcttcgcgggttccgacagcggtggc

SEQ ID NO: 891953 - DNA, 75 bp, synthetic construct
  source 1..75: mol_type = other DNA
atgaacggtaaccgcgctgaaatgagcccggaagccgccggcattgctacctgcctgatgacgtacagccatcac

SEQ ID NO: 891954 - DNA, 75 bp, synthetic construct
  source 1..75: mol_type = other DNA
gaaccagaaaaatggctgcattacgtcattgaacatatccaagactggccgacaaaccgggtacgcgatctgtga

SEQ ID NO: 891955 - DNA, 75 bp, synthetic construct
  source 1..75: mol_type = other DNA
gattccacccggctggagcacagccttgcaacgcttgccgagcaactgaaccagccgaaagcaaaactatcctca

SEQ ID NO: 891956 - DNA, 75 bp, synthetic construct
  source 1..75: mol_type = other DNA
ctgctcggcgaggcgacggttgaatcgctgcgccatgccctcttttttgagaaaacgcttactaccggtgaagat

SEQ ID NO: 891957 - DNA, 75 bp, synthetic construct
  source 1..75: mol_type = other DNA
tgtatgactaccccggacgtttcaagggggcccacgggcagaactttgcccgctggcagatggacggctggcgaa

SEQ ID NO: 891958 - DNA, 75 bp, synthetic construct
  source 1..75: mol_type = other DNA
ttgataaggtcggtggtaacaactatctctatattaaacgtctttcagcaaacgacactggtgcaacaggagggc

SEQ ID NO: 891959 - DNA, 75 bp, synthetic construct
  source 1..75: mol_type = other DNA
ttaactggatgcgtgattgtcattcttcagatgataaagacgtcattgcaattgatggaaaaacgctccggcatt

SEQ ID NO: 891960 - DNA, 75 bp, synthetic construct
  source 1..75: mol_type = other DNA
ctgccagcgattatctgcgcgaacgtgttagcgacattcgcgatgttagcgaacagttgctgcatatcacctggc

SEQ ID NO: 891961 - DNA, 75 bp, synthetic construct
  source 1..75: mol_type = other DNA
atatcttctgtatatgggcatacaaatagctatcttaaagatagagcctattacctagatccaaaaaacttatca

SEQ ID NO: 891962 - DNA, 75 bp, synthetic construct
  source 1..75: mol_type = other DNA
ggggggatgcatttgttattcgcagtgtttccgttcttcctgaaagtattcccgctggtttcagtgttcttgcgg

SEQ ID NO: 891963 - DNA, 75 bp, synthetic construct
  source 1..75: mol_type = other DNA
ttagatgctaactgcgttgaccagtttatagcacatttggatgacaatatatctgttggaacaccatttgcttgt

SEQ ID NO: 891964 - DNA, 75 bp, synthetic construct
  source 1..75: mol_type = other DNA
gatagacccaatggggttagatgcgattgagaatatgacatcaggtggactaatttatgccgtatctggtgtacc

SEQ ID NO: 891965 - DNA, 75 bp, synthetic construct
  source 1..75: mol_type = other DNA
ggcggttgtggaaaattcgcctgccgctgccgatggcggataaacacagtccactgccggaatccgtcgcgcaac

SEQ ID NO: 891966 - DNA, 75 bp, synthetic construct
  source 1..75: mol_type = other DNA
acgcgatagggcgctttggccgcatctcggaagtagcatcgcgcctcaccggacagctttccggcgaagccaact

SEQ ID NO: 891967 - DNA, 75 bp, synthetic construct
  source 1..75: mol_type = other DNA
acgccgccgtattgaatatgatctctttctaatggttgaagaaattcacgtactggacatcatccgtcaagggtt

SEQ ID NO: 891968 - DNA, 75 bp, synthetic construct
  source 1..75: mol_type = other DNA
agaaaggtatccatccacaaaatcacctggccggttacagcggtgtgcttcaggccgatgcttacggtggttacc

SEQ ID NO: 891969 - DNA, 75 bp, synthetic construct
  source 1..75: mol_type = other DNA
agcaggcgatgttcagaaaagggatggaaatccacgtaaggcagcgcaccatgaagaaggagctggaaaagctga

SEQ ID NO: 891970 - DNA, 75 bp, synthetic construct
  source 1..75: mol_type = other DNA
atgcaattcatccataatgatcttggtcaaagaaaaagaggggagattgttgaaattaccctcaccagtggtgca

SEQ ID NO: 891971 - DNA, 75 bp, synthetic construct
  source 1..75: mol_type = other DNA
ggcgattggtctctccagcgactgaaaaaaggaggcggggacaagaagccaaccccgacgtacatccatgttttc

SEQ ID NO: 891972 - DNA, 75 bp, synthetic construct
  source 1..75: mol_type = other DNA
agggctccacgagtaatgcagatgctggcattcatgaaggctacagcatcatcaatcagttcttcaaacaaaatg

SEQ ID NO: 891973 - DNA, 75 bp, synthetic construct
  source 1..75: mol_type = other DNA
ctgcactgacaagtgttggacgtgcaattcttagtaagcccagtattcagagcgttcttaattaccttggtttgg

SEQ ID NO: 891974 - DNA, 75 bp, synthetic construct
  source 1..75: mol_type = other DNA
ctttaaagagaccagcgattactttaccagtcgcaaggtcagtgagtccggcagccatactgacaataatgctga

SEQ ID NO: 891975 - DNA, 75 bp, synthetic construct
  source 1..75: mol_type = other DNA
gtaatacgcacgtcctgaaaggctatgtgtttgccctgatgtggctgcagacctggccgttgttgtatgccattc

SEQ ID NO: 891976 - DNA, 75 bp, synthetic construct
  source 1..75: mol_type = other DNA
gtatttgactgagatgaagcagttacttggtgatgcgactgttgaatcacttcgccatgctctcttttttgagaa

SEQ ID NO: 891977 - DNA, 75 bp, synthetic construct
  source 1..75: mol_type = other DNA
caaaggtttagcaaacagtcgtgttggtttagtagttttgtctccggcgtttataagcaaaggttggacaaatta

SEQ ID NO: 891978 - DNA, 75 bp, synthetic construct
  source 1..75: mol_type = other DNA
caggggaaaatcagataccggacatggtttcatttagtggggtgagggattattacggaaaacaacttttgccag

SEQ ID NO: 891979 - DNA, 75 bp, synthetic construct
  source 1..75: mol_type = other DNA
atatcagtaatgagcaggcgactcaggaactggcatccagaagtacgagagcttctgccgggatgtatggagatg

SEQ ID NO: 891980 - DNA, 75 bp, synthetic construct
  source 1..75: mol_type = other DNA
acgcatccgcgatattcacgccagtatgcgccgtgtttatttgcaggtgatttgcccccctgctgactctcagcc

SEQ ID NO: 891981 - DNA, 75 bp, synthetic construct
  source 1..75: mol_type = other DNA
gccgatctggatcgtaacggcattcaggatctggttatctggttgccaagtgccggtaatggtctggcgccctat

SEQ ID NO: 891982 - DNA, 75 bp, synthetic construct
  source 1..75: mol_type = other DNA
taattccaggctatgacaagccgcagccgccaggctgcctactcggtctgtccgaagaagcaccaaaatcacgta

SEQ ID NO: 891983 - DNA, 75 bp, synthetic construct
  source 1..75: mol_type = other DNA
atcgagcaattttggttcggtaccgaaaactgcccgcagataggtaaggaaaatatggttccgaagtttgctctt

SEQ ID NO: 891984 - DNA, 75 bp, synthetic construct
  source 1..75: mol_type = other DNA
ggatgaggattttgcgaacttctactcaatcgttggcctgccatatgatgttactgtctatggtgggggggaatt

SEQ ID NO: 891985 - DNA, 75 bp, synthetic construct
  source 1..75: mol_type = other DNA
tacaacgcgtaaatggaagtcttgacggttcctttttactatataaaaatggtattgtattagggaattcatctg

SEQ ID NO: 891986 - DNA, 75 bp, synthetic construct
  source 1..75: mol_type = other DNA
taccccctgaacatttatgggatgatggcgctaatggacttctgataaattattatgcatatggaaactacaact

SEQ ID NO: 891987 - DNA, 75 bp, synthetic construct
  source 1..75: mol_type = other DNA
gcctgaagggaaagctgaacgttatcagcaagtgttacactcagcgcattgagcgacataatctgaatctgagac

SEQ ID NO: 891988 - DNA, 75 bp, synthetic construct
  source 1..75: mol_type = other DNA
agctatcccgcgctcacgcgttttacttatacccccaaccgtaaactcgtcctcaaacccatcgccgggcgcgac

SEQ ID NO: 891989 - DNA, 75 bp, synthetic construct
  source 1..75: mol_type = other DNA
taccagtacatcagttattccgacaaagggggctttcataccagcaaaattcaaaacaaatagaggaaaaaaggt

SEQ ID NO: 891990 - DNA, 75 bp, synthetic construct
  source 1..75: mol_type = other DNA
atggcctatcgttccgcaccgcttcttgaagatgttatctggcgaacgcatctccagccgcaagatccaacactt

SEQ ID NO: 891991 - DNA, 75 bp, synthetic construct
  source 1..75: mol_type = other DNA
gatgaaacaggggcagatgtcctctttattgatgctgagaaacatggtatcagtctgaaggtaatgtctgagcgt

SEQ ID NO: 891992 - DNA, 75 bp, synthetic construct
  source 1..75: mol_type = other DNA
tgagatcaaatcatggtggagttctccggccacagtggggcaaaacacaccagccacaacaggcgtaccgtctta

SEQ ID NO: 891993 - DNA, 75 bp, synthetic construct
  source 1..75: mol_type = other DNA
acgcatccgcgatattcacgccagtatgcgccgtgtttatttgcaggtgatttgccccctgctgactctcagcca

SEQ ID NO: 891994 - DNA, 75 bp, synthetic construct
  source 1..75: mol_type = other DNA
atttcagtagcgaaaaaagtaaaatataaaagtctgactcgctatgtgctgctttcggtgtgcatctcaacggtt

SEQ ID NO: 891995 - DNA, 75 bp, synthetic construct
  source 1..75: mol_type = other DNA
tattttttctattgtcgattcctctggggaaggtgcgaacaagttcctgatatgagatcatcatattcatccgga

SEQ ID NO: 891996 - DNA, 75 bp, synthetic construct
  source 1..75: mol_type = other DNA
gctaacgctgcagcacggattaaactacccagcggtaaaggaattgacctctctggaagtcttgcaaaagctgtt

SEQ ID NO: 891997 - DNA, 75 bp, synthetic construct
  source 1..75: mol_type = other DNA
ggtcaaaacgctgcggactgaacttggtggcgtgaatgactcaatgacgcgcatgcagcgctttcgtgctgctgg

SEQ ID NO: 891998 - DNA, 75 bp, synthetic construct
  source 1..75: mol_type = other DNA
atagctaacactgcatataacgagctgtcaggtcctgagcgtattaaaaaaatccccgttatcaataacgctatc

SEQ ID NO: 891999 - DNA, 75 bp, synthetic construct
  source 1..75: mol_type = other DNA
cagttcggcgcgagcaactcttggcattcgctcagagcgcgaaatacagcgcgaaatacagcagaccatggcggc

SEQ ID NO: 892000 - DNA, 75 bp, synthetic construct
  source 1..75: mol_type = other DNA
tgcagctgcttgcccgtgataccggctccaaagtgcttaaacaggcactgcagggcatcagccgggataccaaag

SEQ ID NO: 892001 - DNA, 75 bp, synthetic construct
  source 1..75: mol_type = other DNA
cttttaacacaattgttgataaaattgtggcttcaaatccagcatataaaaaacttgaagataaactcaaaacag

SEQ ID NO: 892002 - DNA, 75 bp, synthetic construct
  source 1..75: mol_type = other DNA
ctacatatcaaacatctgcgtcctttggcattgatgaagtaccaactctggacgcatcaaacatctcggtgacac

SEQ ID NO: 892003 - DNA, 75 bp, synthetic construct
  source 1..75: mol_type = other DNA
tgcatatcatgagtacggcacaggtggagttagggctatcgatgtaagagataattctcagctaaattatctcaa

SEQ ID NO: 892004 - DNA, 75 bp, synthetic construct
  source 1..75: mol_type = other DNA
tctacaaaaatcccggggtcaggtgttgactgggtgaatgctgatggagttagtggaattacagtcgaacctaaa

SEQ ID NO: 892005 - DNA, 75 bp, synthetic construct
  source 1..75: mol_type = other DNA
cttatctacaaagtttagacagaataatagatatggctattaagataaaaaactcattttatactgagataaatt

SEQ ID NO: 892006 - DNA, 75 bp, synthetic construct
  source 1..75: mol_type = other DNA
gaacataaaacactatcaataagttggagtcattaccaccgggttattgctgaattaatccttaatacattaaat

SEQ ID NO: 892007 - DNA, 75 bp, synthetic construct
  source 1..75: mol_type = other DNA
gctgaattaatccttaatacattaaataagatggctgaaagctttggctttacggataaccctcgatacattgcg

SEQ ID NO: 892008 - DNA, 75 bp, synthetic construct
  source 1..75: mol_type = other DNA
atgttacaaataagagctgaagcaggtaattatttagtaatgctaggcgaaatagtaaatgacgattatgaagtg

SEQ ID NO: 892009 - DNA, 75 bp, synthetic construct
  source 1..75: mol_type = other DNA
tgatagctccaaaagcaaaaaaagaactacttgaacagtatcttccagcattcaacgatggctttagagagtttc

SEQ ID NO: 892010 - DNA, 75 bp, synthetic construct
  source 1..75: mol_type = other DNA
atccgaaaaaggagtggcgctgggaccggagccgtggcatatgcatccgattgtgtttttggaggcaattgcaga

SEQ ID NO: 892011 - DNA, 75 bp, synthetic construct
  source 1..75: mol_type = other DNA
aacccggacttttcctccggaagatttcaggatggcattggcaggatttacttcctcgatcgtattgctgctgcg

SEQ ID NO: 892012 - DNA, 75 bp, synthetic construct
  source 1..75: mol_type = other DNA
catcaccgcctgtgcacacgaaattcggtgtaactggtcaggtctggatgcctgaagcagttctcaatgagttac

SEQ ID NO: 892013 - DNA, 75 bp, synthetic construct
  source 1..75: mol_type = other DNA
cctgaaaatcaagatttgttgttcctgactcgctctggaaactcatatggccgacgtggcactgatcaatcgtca

SEQ ID NO: 892014 - DNA, 75 bp, synthetic construct
  source 1..75: mol_type = other DNA
cccagacagctgcctgtcgtaccgctcgtgtactgggggactgttatcactgggaaaagattgctgcaccgctga

SEQ ID NO: 892015 - DNA, 75 bp, synthetic construct
  source 1..75: mol_type = other DNA
aggaatcattagcctatgaattaggtgttacccaaagcgctgttaatcagctaatggctggcatcaacgccataa

SEQ ID NO: 892016 - DNA, 75 bp, synthetic construct
  source 1..75: mol_type = other DNA
atgaacatgaaaaagaaaccgttaacccctgagcaactggaagacgccaagcgtctgaaaagtatttttaacgct

SEQ ID NO: 892017 - DNA, 75 bp, synthetic construct
  source 1..75: mol_type = other DNA
ctctatgagatggggcatcgggagatcgcgttgctggcaggaccggacaattctgtctcggccaaactccggtta

SEQ ID NO: 892018 - DNA, 75 bp, synthetic construct
  source 1..75: mol_type = other DNA
gccggtatgttcaatacccgcacgctggcaaacattcaggcatcatggcgctttaaagggatcgcagcacatgcc

SEQ ID NO: 892019 - DNA, 75 bp, synthetic construct
  source 1..75: mol_type = other DNA
attacgggttttgaaagagattggttttaaggctggttttctgcttttgctgaagaataaactcatctacaatct

SEQ ID NO: 892020 - DNA, 75 bp, synthetic construct
  source 1..75: mol_type = other DNA
atttatcaggacacctgcgaacaaaacataatttatcaacgccagattcaggtaatgagagaacaccatgtataa

SEQ ID NO: 892021 - DNA, 75 bp, synthetic construct
  source 1..75: mol_type = other DNA
atgcagggtttacttttccatcagaggatattggtgtcgttagtgggattctggccctggtgctgtataatttta

SEQ ID NO: 892022 - DNA, 75 bp, synthetic construct
  source 1..75: mol_type = other DNA
atgggtaatcagcctgcaacaatgacagttaacctgagtgtgccagatgatttcaccggacgcgtactggtttac

SEQ ID NO: 892023 - DNA, 75 bp, synthetic construct
  source 1..75: mol_type = other DNA
gctcacttgctgtgatatctaattatctggaaaactataaccgggtatttgcattacgagctgacctgagatttg

SEQ ID NO: 892024 - DNA, 75 bp, synthetic construct
  source 1..75: mol_type = other DNA
aggcgcagaaaatcgccgctgacaacgatgatatcgtctgcctgtttctcgatgttgatccttacagctccgtgt

SEQ ID NO: 892025 - DNA, 75 bp, synthetic construct
  source 1..75: mol_type = other DNA
gtgctgtataattttatttttgatctcaaggcgtactgggcttataaatgcgtcacgaagaatatcgatttttcg

SEQ ID NO: 892026 - DNA, 75 bp, synthetic construct
  source 1..75: mol_type = other DNA
gcaggaaatcgatctgtttttctccagtgaaaatgcgttgtcgaccttttttgccaagccgctttggcttcggtt

SEQ ID NO: 892027 - DNA, 75 bp, synthetic construct
  source 1..75: mol_type = other DNA
agcggttgctggagatgacagacagtaacgaggacggacattactcagagcaggaatatcttcaggcaattcata

SEQ ID NO: 892028 - DNA, 75 bp, synthetic construct
  source 1..75: mol_type = other DNA
acggccggacgcaacgttaccagtatgacctgaccggaaaactcacgcagagtgaagatgaggggcttatcaccc

SEQ ID NO: 892029 - DNA, 75 bp, synthetic construct
  source 1..75: mol_type = other DNA
ttcattaaattatgaagagcaaaaaaaatatcgatctttattgcaaaataaaaaagaaatcttaagaaaagaaaa

SEQ ID NO: 892030 - DNA, 75 bp, synthetic construct
  source 1..75: mol_type = other DNA
tgggctattaaaaccggataaaggcataaaagcattagtacgtaaaatttattattcgcttgccgatcaattttt

SEQ ID NO: 892031 - DNA, 75 bp, synthetic construct
  source 1..75: mol_type = other DNA
gaatggaagcatgatcattctgaagccaagcatgtatgctgaagagcctgaaaccaatatgattgttaaaaccaa

SEQ ID NO: 892032 - DNA, 75 bp, synthetic construct
  source 1..75: mol_type = other DNA
agattatccccaccattcgtggagaagcctgggtatgcggcgacaatcgcctgctccttaatccggacgatccct

SEQ ID NO: 892033 - DNA, 75 bp, synthetic construct
  source 1..75: mol_type = other DNA
ttacagattatatgattcgagcattgaaaatgttagtgaagctaatctgttgatggttttttccaaaagtgcttc

SEQ ID NO: 892034 - DNA, 75 bp, synthetic construct
  source 1..75: mol_type = other DNA
tcgaagttgaattacacctttgtaccagagacgatgagcctaaaaccgcaaagctcaaattaagaaacatcaaag

SEQ ID NO: 892035 - DNA, 75 bp, synthetic construct
  source 1..75: mol_type = other DNA
atcaatcagttcttcaaacaaaatgaaacccttaattgctcacgcgaaaaattctccgatttcttgctaacgaag

SEQ ID NO: 892036 - DNA, 75 bp, synthetic construct
  source 1..75: mol_type = other DNA
gatacgattgaacttcaaagtcccaagctcaagagaatggcggaaataaatcgctcgaaatacaagctgggacga

SEQ ID NO: 892037 - DNA, 75 bp, synthetic construct
  source 1..75: mol_type = other DNA
tatgcttgagtttgctctggaagctccagagggttttcctgatcgtattccgcaggttatcagtgcatttgtcgg

SEQ ID NO: 892038 - DNA, 75 bp, synthetic construct
  source 1..75: mol_type = other DNA
tgtgcttacgatttagagagtattatggtattgactataaacttctatatttaaatatgttgttctcaagtatta

SEQ ID NO: 892039 - DNA, 75 bp, synthetic construct
  source 1..75: mol_type = other DNA
ggtgcattgaacagcgacaagatccggagatggcaaacgtgattttagtcaacgatgacgaaagttgcgggtatt

SEQ ID NO: 892040 - DNA, 75 bp, synthetic construct
  source 1..75: mol_type = other DNA
actcattgataaaattcgagaatcatatattcgttttcgactctaatttctttaatgcacaaagcattgatgaaa

SEQ ID NO: 892041 - DNA, 75 bp, synthetic construct
  source 1..75: mol_type = other DNA
caaatcagcgaggtttgataagacgccgtgaaggtgaagcccagttgatcgagaacgatttaggtaaagatgatt

SEQ ID NO: 892042 - DNA, 75 bp, synthetic construct
  source 1..75: mol_type = other DNA
atacccttattgagtctgctaatatcactatctgctgctgttgctagcatacttgcattgataataactatgaaa

SEQ ID NO: 892043 - DNA, 75 bp, synthetic construct
  source 1..75: mol_type = other DNA
ggcggtaattctgcaggtaacttcgcgctgacaaccggaactgtcgaagctggggcttacgtctacacgctggct

SEQ ID NO: 892044 - DNA, 75 bp, synthetic construct
  source 1..75: mol_type = other DNA
gagctttgacctgattgacggggtaaagcgaccagataacgtggtgaaggggattctggagcagttatataaagc

SEQ ID NO: 892045 - DNA, 75 bp, synthetic construct
  source 1..75: mol_type = other DNA
aggccgagcagttaagcaaatacgaaaaatgcttcatgatgaatacaataatcgcctgatagtaaataacataat

SEQ ID NO: 892046 - DNA, 75 bp, synthetic construct
  source 1..75: mol_type = other DNA
atccgaaaaaggagtggcgctgggaccggagccgtggcatatgcatccgattgtgtttttggaggcaattcgtgt

SEQ ID NO: 892047 - DNA, 75 bp, synthetic construct
  source 1..75: mol_type = other DNA
ttgaaggttgctaatgattgcgcaaaatgggtcatggaaaatgaagataaaatatttcaatattttatagattca

SEQ ID NO: 892048 - DNA, 75 bp, synthetic construct
  source 1..75: mol_type = other DNA
taaggataatccattaatagaactccttcctcgtaaggacgaagttaatgaattaattaacttctatgagagtcg

SEQ ID NO: 892049 - DNA, 75 bp, synthetic construct
  source 1..75: mol_type = other DNA
ggggctaccactttataaatcttcagaaacgttgttgaattttgcttatcgatactatagcgagtataaaaatag

SEQ ID NO: 892050 - DNA, 75 bp, synthetic construct
  source 1..75: mol_type = other DNA
tcgatcgtaatggcattcaggatttggttatctggcgaggtgtttcgggaaacgggctggcgccttcctcgtttt

SEQ ID NO: 892051 - DNA, 75 bp, synthetic construct
  source 1..75: mol_type = other DNA
ctggatatgcagtttgattccggttactggataaccagtttgtatcaggtaaaagaggccaaatggcagcgcgtt

SEQ ID NO: 892052 - DNA, 75 bp, synthetic construct
  source 1..75: mol_type = other DNA
tcgcggtgtgacggcctctgttgagggtgggtatacctttgaagcgggaacatttagcggcagcgaagagacgct

SEQ ID NO: 892053 - DNA, 75 bp, synthetic construct
  source 1..75: mol_type = other DNA
tgatgcaggagaaagaacacacgttatcgaagaaatgtcgtctgggagatgcgttccgatatatcaggaagcact

SEQ ID NO: 892054 - DNA, 75 bp, synthetic construct
  source 1..75: mol_type = other DNA
ccttccggggtatcctgcaggcggatgcgttcagcggttacgatcggctgttcagtgcagaacgtgaaggtggtg

SEQ ID NO: 892055 - DNA, 75 bp, synthetic construct
  source 1..75: mol_type = other DNA
ttgaacaggctgaagccctgctgaaacgacgcgaacagaacagcgatcgttacagcgggcatgaggatgacccgc

SEQ ID NO: 892056 - DNA, 75 bp, synthetic construct
  source 1..75: mol_type = other DNA
tacgcagcgaattgagcggcataacctgaatctgaggcagcacctggcacggctgggacggcagggacggaagtc

SEQ ID NO: 892057 - DNA, 75 bp, synthetic construct
  source 1..75: mol_type = other DNA
tgcgctggcacgtgccgaagaaaagatcgaagaagatgagcgggaaatagagcatctgcgggccctggtggaaaa

SEQ ID NO: 892058 - DNA, 75 bp, synthetic construct
  source 1..75: mol_type = other DNA
gtgaccctggagccccgtgttttcggctggatggaccgtctgtgcgaagactactgcggtggtatctggaatctg

SEQ ID NO: 892059 - DNA, 75 bp, synthetic construct
  source 1..75: mol_type = other DNA
atgccatgacggtccattattatcggttgcgggattacgccctgcagcatccggaatgcagcgccattatgcgca

SEQ ID NO: 892060 - DNA, 75 bp, synthetic construct
  source 1..75: mol_type = other DNA
gcccgacagggtgtagaactgagccgtgcgttactctccaactgggttgacgcatgctgccagttaatgacgccg

SEQ ID NO: 892061 - DNA, 75 bp, synthetic construct
  source 1..75: mol_type = other DNA
tatcagtaccaaaagcgcgacggtggaagaagcactgaaactaatcggcgaactgtacgccattgagcacgaaat

SEQ ID NO: 892062 - DNA, 75 bp, synthetic construct
  source 1..75: mol_type = other DNA
tccggagcagcaccttcgtcccttccggggtatcctgcaggcagatgcgtttaatggttacgatcggctgttcag

SEQ ID NO: 892063 - DNA, 75 bp, synthetic construct
  source 1..75: mol_type = other DNA
atgacggcgttactctccaactgggttgacgcgtgctgcctgttaatgacaccggtgaatgatgccctgtaccgt

SEQ ID NO: 892064 - DNA, 75 bp, synthetic construct
  source 1..75: mol_type = other DNA
acgaaatcatcctggtaacctgtggatctgcgttcaagaacaaaggtgttcaggcgatgctggatgcggtaattg

SEQ ID NO: 892065 - DNA, 75 bp, synthetic construct
  source 1..75: mol_type = other DNA
atgtgactgcatcgttgaagcaccggcaccatcccgtccgatagagcgtggtatcgcgggcccggggttacttgc

SEQ ID NO: 892066 - DNA, 75 bp, synthetic construct
  source 1..75: mol_type = other DNA
cgtgtgggggctgaagctgccgacgctgcgtcagcgcctgttccgctgtgtgagtatccgtgagaacgatgacgg

SEQ ID NO: 892067 - DNA, 75 bp, synthetic construct
  source 1..75: mol_type = other DNA
accacataccgcttcacgcagctggcgctgggaaactacaggctgacagtccgggcggcaaatgcctggggacag

SEQ ID NO: 892068 - DNA, 75 bp, synthetic construct
  source 1..75: mol_type = other DNA
tttgttggtcagggcgatcagatattcatgaacgacgtgttcctgaaacgcctgacggcccccaccattaccagc

SEQ ID NO: 892069 - DNA, 75 bp, synthetic construct
  source 1..75: mol_type = other DNA
gtgatcgatgccatcagtgaagggccgattgaaggtccggtggacggattaaaaagtgtgctgctgaacagtacg

SEQ ID NO: 892070 - DNA, 75 bp, synthetic construct
  source 1..75: mol_type = other DNA
cagccgtttgaccggcagattgttattccggcggtggcattcagtggcgctaagcatgagagagagcatactgat

SEQ ID NO: 892071 - DNA, 75 bp, synthetic construct
  source 1..75: mol_type = other DNA
acccggaccatcacgtcggcaaacatcgaccgtctgcgcctgaccttcggtgtgcaggcactggtggaaaccacc

SEQ ID NO: 892072 - DNA, 75 bp, synthetic construct
  source 1..75: mol_type = other DNA
ggaagtgaaatacgacacgccgatcacccgcaccatcacgtcggcaaacattgaccgactgcgttttaccttcgg

SEQ ID NO: 892073 - DNA, 75 bp, synthetic construct
  source 1..75: mol_type = other DNA
gccgcaaaaactcttatgacctttgtcaaatattaagcccaaaaagacctacgcagctccgggagcttcgttata

SEQ ID NO: 892074 - DNA, 75 bp, synthetic construct
  source 1..75: mol_type = other DNA
agctgcgccactgatgcagtcactgtatgactggatacagactcagatgaaaacactgtcgcgtcactcggatac

SEQ ID NO: 892075 - DNA, 75 bp, synthetic construct
  source 1..75: mol_type = other DNA
atggctgggggaaatcgacaacaacatcgcagagaacgccttacggggagtggccgtaggccggaaaaactggct

SEQ ID NO: 892076 - DNA, 75 bp, synthetic construct
  source 1..75: mol_type = other DNA
atgacaaccttttcgcatagctccaccacaccttctgtttccgtaacaactgcatcagggagtgaccagcctcag

SEQ ID NO: 892077 - DNA, 75 bp, synthetic construct
  source 1..75: mol_type = other DNA
cccttaccggtcgggttgacgacccggccgtgcagcgcccgctgcgtcaaacccgcacccgcaaaccgttccccg

SEQ ID NO: 892078 - DNA, 75 bp, synthetic construct
  source 1..75: mol_type = other DNA
gggcagcggtaaaacaaggattgcccgactgtgggtctacgtccgtgatgaccgtaacgcagattcggaaatgcc

SEQ ID NO: 892079 - DNA, 75 bp, synthetic construct
  source 1..75: mol_type = other DNA
gcaacacctccgccccttccggggtatcctgcaggcggatgcgttcacaggttacgacaggttgttcagtgcaga

SEQ ID NO: 892080 - DNA, 75 bp, synthetic construct
  source 1..75: mol_type = other DNA
gttactgacgtcgctgcatgaatggatggtggagaagaatggcacgctgtcgaaaaaatccagactgggcgaagc

SEQ ID NO: 892081 - DNA, 75 bp, synthetic construct
  source 1..75: mol_type = other DNA
cgctgggacggtacacgctgacagtccgggcggtaaatgcgtggggacagcagggcgatccggcgtcggtatcgt

SEQ ID NO: 892082 - DNA, 75 bp, synthetic construct
  source 1..75: mol_type = other DNA
caacttctgtgatgatggtctggcggaggcggataataatgccgcggaaagagcgcttcgtgcagtctgtctcgg

SEQ ID NO: 892083 - DNA, 75 bp, synthetic construct
  source 1..75: mol_type = other DNA
ttggttgccaccatagtccctgatgaacagcgcatcagcttctggccgcagcattttggcctcattccacagtgg

SEQ ID NO: 892084 - DNA, 75 bp, synthetic construct
  source 1..75: mol_type = other DNA
gcgacggtggaagaagcactgaaactaatcggcgaactgtacgccattgagcacgaaatacgcgggttgccggtg

SEQ ID NO: 892085 - DNA, 75 bp, synthetic construct
  source 1..75: mol_type = other DNA
cgttacactcagcgcattgagcgacataacctgaatctgagacaacatctggcaaggctgggacggaagtcactg

SEQ ID NO: 892086 - DNA, 75 bp, synthetic construct
  source 1..75: mol_type = other DNA
tctggccacactggagcgtcttctaagcctgctgtcggcctttgaggtcgtggtatggatgacggatggctggcc

SEQ ID NO: 892087 - DNA, 75 bp, synthetic construct
  source 1..75: mol_type = other DNA
tatcagcaagcgttacactcagcgcattgagcgacataatctgaatctgagacaacatctggcaaggccgggacg

SEQ ID NO: 892088 - DNA, 75 bp, synthetic construct
  source 1..75: mol_type = other DNA
agcgacataatctgagacaacatctggcacggctgggacggaagtcgctgtcgttctcaaaatcggtggagcagc

SEQ ID NO: 892089 - DNA, 75 bp, synthetic construct
  source 1..75: mol_type = other DNA
gccgcagtcggtaacctcgcgcatacaaccgggcagtgatgtgattgtctgcgctgaaatggacgaacagtgggg

SEQ ID NO: 892090 - DNA, 75 bp, synthetic construct
  source 1..75: mol_type = other DNA
tacgcagcgcattgagcgacataatctgaatctgagacaacatctggcaaggctgggacggaagtcactgtcgtt

SEQ ID NO: 892091 - DNA, 75 bp, synthetic construct
  source 1..75: mol_type = other DNA
tggccgctgtatgaatcacgcctgaagggaaagctgcacgttatcagcaagcgatatacgcagcgcattgagcga

SEQ ID NO: 892092 - DNA, 75 bp, synthetic construct
  source 1..75: mol_type = other DNA
cgctgtatgaatcacgcctgaagggaaagctgcacgttatcagcaagtgttacactcagcgcattgagcgacata

SEQ ID NO: 892093 - DNA, 75 bp, synthetic construct
  source 1..75: mol_type = other DNA
agcaagcgttacactcagcgcattgagcgacataatctgaatctgagacaatatctggcaaggctgggacggaag

SEQ ID NO: 892094 - DNA, 75 bp, synthetic construct
  source 1..75: mol_type = other DNA
cgcattgagcgacataatctgaatctgagacaacatctggcaaggccgggacggaagttactgtcgttctcaaaa

SEQ ID NO: 892095 - DNA, 75 bp, synthetic construct
  source 1..75: mol_type = other DNA
ttgaaaatcagaacagggatgtgcgcttttttattttgcttagtgcttcctgcgcaggctaccagctttaccgaa

SEQ ID NO: 892096 - DNA, 75 bp, synthetic construct
  source 1..75: mol_type = other DNA
ggcgggtaatgcgcaattttaccgtgctgacctcgatcgtaatggcattcaggatttggttatctggcgaggtgt

SEQ ID NO: 892097 - DNA, 75 bp, synthetic construct
  source 1..75: mol_type = other DNA
cagcgcattgagcgacataacctgaatctgagactacatctggcaaggctgggcaggaagtcactgtcgttctca

SEQ ID NO: 892098 - DNA, 75 bp, synthetic construct
  source 1..75: mol_type = other DNA
cgctgtatgaagcccgcctgaagggaaagctgcacgttatcagcaagcgttacactcagcgcattgagcgacata

SEQ ID NO: 892099 - DNA, 75 bp, synthetic construct
  source 1..75: mol_type = other DNA
acatatcccggatgatagcatttgcggttgcgcagtctgcgatagcagacaatgtggcccccccgcagacgctgc

SEQ ID NO: 892100 - DNA, 75 bp, synthetic construct
  source 1..75: mol_type = other DNA
tggtatggatgacggatggctggctgctgtatgaatcacgcctgaagggaaagctgcacgttatcagcaagcgtt

SEQ ID NO: 892101 - DNA, 75 bp, synthetic construct
  source 1..75: mol_type = other DNA
tatctgccgatgagtgacagcgaatacgcgcaaaagcgggcgctgaaacctctcctgaccatgccttatgatgcc

SEQ ID NO: 892102 - DNA, 75 bp, synthetic construct
  source 1..75: mol_type = other DNA
ttgagcgacataatctgaatctgagacaacatctggcaaggccgggacggaagtcactgtcgttctcaaaatcgg

SEQ ID NO: 892103 - DNA, 75 bp, synthetic construct
  source 1..75: mol_type = other DNA
atgaactggcaactcatctcattttttggcgatagcaccgttttgctgcccagcgcagcggcgctgtttattgtc

SEQ ID NO: 892104 - DNA, 75 bp, synthetic construct
  source 1..75: mol_type = other DNA
ttgaccgcctgcgggtgaccttcggggtgcagtcactggtggagaccacctcaaagggtgaccgtaacccggcat

SEQ ID NO: 892105 - DNA, 75 bp, synthetic construct
  source 1..75: mol_type = other DNA
attgatatgccgagtggcaggggaagcgtcactctggagtttaagattttccagaaaggcaatcagggggcaggc

SEQ ID NO: 892106 - DNA, 75 bp, synthetic construct
  source 1..75: mol_type = other DNA
attttcagataacggcggtcccgaaactggctgtatatgacccgacggtacagtttgaattctggttttcggagg

SEQ ID NO: 892107 - DNA, 75 bp, synthetic construct
  source 1..75: mol_type = other DNA
tattccgcggtggtaagcatgagaatttcaacagtaataaccaacagtcatactggtattcaacctgccggttaa

SEQ ID NO: 892108 - DNA, 75 bp, synthetic construct
  source 1..75: mol_type = other DNA
taccacgctgataagcctggttgacggacaggggattccggtcagcgtggaggtacagtccgtcaccgacggcgt

SEQ ID NO: 892109 - DNA, 75 bp, synthetic construct
  source 1..75: mol_type = other DNA
ctgattaaaactgaactgctggagacgcagaccgtggatttcagcgtgggtgcagaagggcttcgccatgtaccg

SEQ ID NO: 892110 - DNA, 75 bp, synthetic construct
  source 1..75: mol_type = other DNA
ctgattaaaactgaactgctggagacgcagaccgtggatttcagcgttggagcagaagggcttcgccatgtaccg

SEQ ID NO: 892111 - DNA, 75 bp, synthetic construct
  source 1..75: mol_type = other DNA
taccacgctgataagcctggttgacgggcagggtactccggtcagcgtggaggtacagtccgtcaccgacggcgt

SEQ ID NO: 892112 - DNA, 75 bp, synthetic construct
  source 1..75: mol_type = other DNA
taccacgctgataagcctggttgacggccagggtagtccggtcagcgtggaggtacagtccgtcaccgacggcgt

SEQ ID NO: 892113 - DNA, 75 bp, synthetic construct
  source 1..75: mol_type = other DNA
taccacgctgataagcctggttgacggtcaggggaatccggtcagcgtggaggtacagtccgtcaccgacggcgt

SEQ ID NO: 892114 - DNA, 75 bp, synthetic construct
  source 1..75: mol_type = other DNA
taagattttccagaaaggcaatcagggggcaggcaatatcaccgactgtacggtgattgtgaccaaaaaagccgc

SEQ ID NO: 892115 - DNA, 75 bp, synthetic construct
  source 1..75: mol_type = other DNA
gagaataacgatatttattcgtcatgccgcctgatagtgaagaaaaatggtgctgaaatttataaccgtaccgcg

SEQ ID NO: 892116 - DNA, 75 bp, synthetic construct
  source 1..75: mol_type = other DNA
gtatggaacggccagacgctgacgttcgttcaggaccgcccgtcggatgtggtgtggccgtacaccaacagcgat

SEQ ID NO: 892117 - DNA, 75 bp, synthetic construct
  source 1..75: mol_type = other DNA
ttcagtctgcgcctgaccagtggaagcggtcaggacagccgtctggtgaccaccgccatcaccgcggatacagag

SEQ ID NO: 892118 - DNA, 75 bp, synthetic construct
  source 1..75: mol_type = other DNA
gctgagtctcaggtgtattcaggggtgattgatatgcctgcaggaagggggcatatgacgctggagttttctgtg

SEQ ID NO: 892119 - DNA, 75 bp, synthetic construct
  source 1..75: mol_type = other DNA
gtatggaacgggcagacgctgacgtttgtgcaggaccgtccgtcagatgtggtgtggccctacacaaacagtgat

SEQ ID NO: 892120 - DNA, 75 bp, synthetic construct
  source 1..75: mol_type = other DNA
ctgattaaaactgaactgctggagacgcagaccgtggatttcagcgtaggcgctgaagggcttcgccatgtaccg

SEQ ID NO: 892121 - DNA, 75 bp, synthetic construct
  source 1..75: mol_type = other DNA
cagtaccctgcctgatggtgtggagacatacggggtgtggggactctccctgccgtcactgcgccgtcgcctgtt

SEQ ID NO: 892122 - DNA, 75 bp, synthetic construct
  source 1..75: mol_type = other DNA
tctggaatttttccgggaaaaaataggaaaactgcatctggctcaggggctatgggagctgatagacaacagcca

SEQ ID NO: 892123 - DNA, 75 bp, synthetic construct
  source 1..75: mol_type = other DNA
caccattaacgagaactgtgtcatcagagggaaactgtctgcaaaccagattgaaggcgacctggtgaagacggt

SEQ ID NO: 892124 - DNA, 75 bp, synthetic construct
  source 1..75: mol_type = other DNA
agagaaactaaaggggctattcccggtagctacagtgcggttattgatatgccgagtggcaggggaagcgtcact

SEQ ID NO: 892125 - DNA, 75 bp, synthetic construct
  source 1..75: mol_type = other DNA
acacgccggtagaggcaaaggacaatctcaaatccacgcagatgatgagtgtgattgatgcgattggtgagggac

SEQ ID NO: 892126 - DNA, 75 bp, synthetic construct
  source 1..75: mol_type = other DNA
atgcgttcggctgcaccagtcgcggtcaggcccaccgtgccgggctgtgggtgataaagactggactgctggaaa

SEQ ID NO: 892127 - DNA, 75 bp, synthetic construct
  source 1..75: mol_type = other DNA
acgactatgccgggactatgaccggcggacgtatcctgtccattgatgctgccacccgcaccctgacgctggacc

SEQ ID NO: 892128 - DNA, 75 bp, synthetic construct
  source 1..75: mol_type = other DNA
cggtgcagcacgtaccggaaaaagaagccatcgtggataacggtgcccgctttgagccgcagtcaggctccctga

SEQ ID NO: 892129 - DNA, 75 bp, synthetic construct
  source 1..75: mol_type = other DNA
tgtgggtgataaagaccggactgctggaaacgcagacggtggatttcacgctcgggtcacaggggctgcgtcaca

SEQ ID NO: 892130 - DNA, 75 bp, synthetic construct
  source 1..75: mol_type = other DNA
ggggactctccctgccgtcactgcgtcgtcgcctgttccgctgtgtctccgtccgggaaaacacggacggcacct

SEQ ID NO: 892131 - DNA, 75 bp, synthetic construct
  source 1..75: mol_type = other DNA
attcagcagatacagcgcgtgcagaaggacacaaatgatgacctggctgcgctgtacatgctgaaggttcaaaaa

SEQ ID NO: 892132 - DNA, 75 bp, synthetic construct
  source 1..75: mol_type = other DNA
ggccgtgaccatacagcaaatccagcgggttcagtcagacacgcgcaatgagctgaatgccatgtatatgctgaa

SEQ ID NO: 892133 - DNA, 75 bp, synthetic construct
  source 1..75: mol_type = other DNA
aaaaagcgtgctgctgaacagtacaccggtgctggacagtgaggggaataccaacatctccggtgtcacggtggt

SEQ ID NO: 892134 - DNA, 75 bp, synthetic construct
  source 1..75: mol_type = other DNA
tggtatcccacagcaagcatcagcgatttgctggttgtggtgatgaagaaggccacagcaggcatcacgattagc

SEQ ID NO: 892135 - DNA, 75 bp, synthetic construct
  source 1..75: mol_type = other DNA
gcgaaaaatgcggatatcagtggtagtgtgaatgcgaactcaggaacgctcaacaatgtcacgattaacgagaac

SEQ ID NO: 892136 - DNA, 75 bp, synthetic construct
  source 1..75: mol_type = other DNA
cgtgttcctgaaacgactgtttgcggtgagcatcacctcgtccggcaatcccccagcattttccctgacgccgga

SEQ ID NO: 892137 - DNA, 75 bp, synthetic construct
  source 1..75: mol_type = other DNA
aaggggaaactgtcagccaatcagattgaaggcgatattgtcaaaacggtcagcaagtctttcccccgcacgaac

SEQ ID NO: 892138 - DNA, 75 bp, synthetic construct
  source 1..75: mol_type = other DNA
agcacctcggaccagctgcagaataagacgctctggtcgtcatacaccgaaatcatcgatgtgaaacagtgctac

SEQ ID NO: 892139 - DNA, 75 bp, synthetic construct
  source 1..75: mol_type = other DNA
gacatcgacggtgaacctgattaacggcagcggtaagccggtgcgcgtggacatcactgcacatcccgcccctga

SEQ ID NO: 892140 - DNA, 75 bp, synthetic construct
  source 1..75: mol_type = other DNA
atttataaccgtaccgcgctggataatacgctgatttacagtggtgttattgatatgccagctggtcacggccac

SEQ ID NO: 892141 - DNA, 75 bp, synthetic construct
  source 1..75: mol_type = other DNA
tgtttgcggtgagtatcacctcgtccggcaatcccccgacgttttccctgacgccggaaggcaagctgacagcaa

SEQ ID NO: 892142 - DNA, 75 bp, synthetic construct
  source 1..75: mol_type = other DNA
atgaccagggattcgaccggcagattatcattcccccggtgctgtttcgcgggacgaaacaccagaatttcaaca

SEQ ID NO: 892143 - DNA, 75 bp, synthetic construct
  source 1..75: mol_type = other DNA
gcacaggcgaaatgggacacgccgcgggtggtgaagggtgtgcgcttcagtctgcgcctgaccagcggaagcgga

SEQ ID NO: 892144 - DNA, 75 bp, synthetic construct
  source 1..75: mol_type = other DNA
tggccatcaggaaccattaccgtcagggtttatgacgatcagccgtttaaccggcagattgttattccggcggtg

SEQ ID NO: 892145 - DNA, 75 bp, synthetic construct
  source 1..75: mol_type = other DNA
tgttcatgaacgacgtgttcctgaagcgactgtttgcggtgagcatcacgtcatccggcaatcctccgacgtttt

SEQ ID NO: 892146 - DNA, 75 bp, synthetic construct
  source 1..75: mol_type = other DNA
caggcaccctgaacagcgttatcccaccggcagtgcagcacctcacggtggaggtgagcgcggctgacggccagt

SEQ ID NO: 892147 - DNA, 75 bp, synthetic construct
  source 1..75: mol_type = other DNA
aagaacggacaggaaatctttcagcaacccgcgacggatgtcagcagggtattttcatcagtcattgatatgcct

SEQ ID NO: 892148 - DNA, 75 bp, synthetic construct
  source 1..75: mol_type = other DNA
accagcggcggtaatcctccggcattttccctgacaccggacgggcggctgacggcaaaaaatgccgatatcagc

SEQ ID NO: 892149 - DNA, 75 bp, synthetic construct
  source 1..75: mol_type = other DNA
gggacgctcaacaacgtcacgattaacgagaactgtcgggttctgggaaaattgtccgccaaccagattgaaggc

SEQ ID NO: 892150 - DNA, 75 bp, synthetic construct
  source 1..75: mol_type = other DNA
ggcagcggtaagccggtgagcgtggccatcactgcacaccccgcgccggaccggatacaggtcagcaccctgccg

SEQ ID NO: 892151 - DNA, 75 bp, synthetic construct
  source 1..75: mol_type = other DNA
gataaacagctacggccagcagggcgaacctgcgaccactaccttcaggattaacgcgcctgtggcaccggccac

SEQ ID NO: 892152 - DNA, 75 bp, synthetic construct
  source 1..75: mol_type = other DNA
cgcagacggtggatttcacgctcgggtcacaggggctgcggcacacgcccggtgacattattgaaatctgtgata

SEQ ID NO: 892153 - DNA, 75 bp, synthetic construct
  source 1..75: mol_type = other DNA
cattcaccgtatcttcatcaggagcgaataactggacaccaacaaccagtatcagcgatctgctggttgtggtga

SEQ ID NO: 892154 - DNA, 75 bp, synthetic construct
  source 1..75: mol_type = other DNA
ggcgattaacagttatggccagcagggggaaccggccaccaccacgttcaggattaatgcacctgcggtacccgc

SEQ ID NO: 892155 - DNA, 75 bp, synthetic construct
  source 1..75: mol_type = other DNA
accgtatcgcgatgattaacccggagaacggcaacaccacgccgctgtttgtggcgcaggggaatcagctgttca

SEQ ID NO: 892156 - DNA, 75 bp, synthetic construct
  source 1..75: mol_type = other DNA
caggggttgtgggaactgatagataacagccagcttgcagatgagatggcggagatgaagaccagcatcacggaa

SEQ ID NO: 892157 - DNA, 75 bp, synthetic construct
  source 1..75: mol_type = other DNA
tgcagatatcagtggcagtgtgaatgcgaacgccgggacgctcaacaatgtcacaattaatgagaactgtcagat

SEQ ID NO: 892158 - DNA, 75 bp, synthetic construct
  source 1..75: mol_type = other DNA
attcgtcatgccgcctgatagtgaagaaaaacggggctgaaatttataaccgaacggctctggataatactctga

SEQ ID NO: 892159 - DNA, 75 bp, synthetic construct
  source 1..75: mol_type = other DNA
aaatcacgcagaccgtcaataaaaaactggaaaatcagagtgcggcaatccagcagatacagaaagttcaggttg

SEQ ID NO: 892160 - DNA, 75 bp, synthetic construct
  source 1..75: mol_type = other DNA
cattaccgcacaccctgcgcctgaccggatacaggtcagccccctgccggatggcgtggagacatacggggtatg

SEQ ID NO: 892161 - DNA, 75 bp, synthetic construct
  source 1..75: mol_type = other DNA
agcccggaaaggatttctggttttatgtgcgcagcgtcaacctggtgggtaaatctgcttttgtggaagccagtg

SEQ ID NO: 892162 - DNA, 75 bp, synthetic construct
  source 1..75: mol_type = other DNA
ctgacggtcagggcgataaacagctacggccagcagggcgaacctgccaccactacattccggattaatgcgcct

SEQ ID NO: 892163 - DNA, 75 bp, synthetic construct
  source 1..75: mol_type = other DNA
gatagtgcggaaaaacggtgctgaaatttataaccgtaccgcgctggataatacgctgatttacagtggcgttat

SEQ ID NO: 892164 - DNA, 75 bp, synthetic construct
  source 1..75: mol_type = other DNA
ggtgggtaaatctgcttttgtggaagccagtggacgggcgagcaatgatgctgcgggctatctggaacttttccg

SEQ ID NO: 892165 - DNA, 75 bp, synthetic construct
  source 1..75: mol_type = other DNA
attgcagacgccgcacaggtggaaacctctgtccgttatctggggaccggcagtcagtggagtgtctccggtccg

SEQ ID NO: 892166 - DNA, 75 bp, synthetic construct
  source 1..75: mol_type = other DNA
agatacagaaagttcaggttgatacaaataataacctgaacagcatgtgggccgtgaaactgcagcagatgcagg

SEQ ID NO: 892167 - DNA, 75 bp, synthetic construct
  source 1..75: mol_type = other DNA
ccgtctgatagtacgaaaaaacggtgctgaaatttataaccgaacggctctggataatacgctgatatatacggg

SEQ ID NO: 892168 - DNA, 75 bp, synthetic construct
  source 1..75: mol_type = other DNA
agcgcaaagcggctcgcatgaggcgcgttacgccactattgccagcgccaaaaagcatatcccggaaagtaacct

SEQ ID NO: 892169 - DNA, 75 bp, synthetic construct
  source 1..75: mol_type = other DNA
aatacaccctgacagtcagggcaattaacagttatggccagcagggcgaaccggccaccaccaccttccggatta

SEQ ID NO: 892170 - DNA, 75 bp, synthetic construct
  source 1..75: mol_type = other DNA
atggctggtaaataactggtatcccacagcaagtatcagcgatctgctggttgtggtgatgaaaaaatccacagc

SEQ ID NO: 892171 - DNA, 75 bp, synthetic construct
  source 1..75: mol_type = other DNA
ggcggcagacgtggacaaatgggcgctgtatgccattgcgcagtactgcgaccagacggtcccggatggtttcgg

SEQ ID NO: 892172 - DNA, 75 bp, synthetic construct
  source 1..75: mol_type = other DNA
tctggttttacgtgcgcagcgtcaacctggtggggaaatctgcgtttgtggaagtcagcgggcagcccagcaatg

SEQ ID NO: 892173 - DNA, 75 bp, synthetic construct
  source 1..75: mol_type = other DNA
gtttgagttctggttttcggaaaaacgcatcacgaacacggcacaggtggaaaaatctgcccgttatctggggag

SEQ ID NO: 892174 - DNA, 75 bp, synthetic construct
  source 1..75: mol_type = other DNA
tccaccggcagtgcagcacctcacggtggaggtgagcgcggctgacggccagtatctggcacaggcgaaatggga

SEQ ID NO: 892175 - DNA, 75 bp, synthetic construct
  source 1..75: mol_type = other DNA
tttcgacgctcaccctgtgtttttctgttattggatgcaaggaggaagctaaaacaacaaaatggtataaggaac

SEQ ID NO: 892176 - DNA, 75 bp, synthetic construct
  source 1..75: mol_type = other DNA
aggacggcaacaccacgccgttatttgtggcgcaggggaatcagctgttcatgaacgatgtgttcctgaagcggc

SEQ ID NO: 892177 - DNA, 75 bp, synthetic construct
  source 1..75: mol_type = other DNA
taccgcgaataccggcacgctcaataatgtcaccattaacgagaactgtgtcatcagagggaaactgtccgcgaa

SEQ ID NO: 892178 - DNA, 75 bp, synthetic construct
  source 1..75: mol_type = other DNA
gtatcagcatggctggtgaataactggtatcccacagcaagtatcagcgatttgctggttgtggtgatgaagaaa

SEQ ID NO: 892179 - DNA, 75 bp, synthetic construct
  source 1..75: mol_type = other DNA
gttcctgacggcgttgctgaatacagcgtgtgggggctgaagctgccgacgctgcgccagcgcctgttccgctgc

SEQ ID NO: 892180 - DNA, 75 bp, synthetic construct
  source 1..75: mol_type = other DNA
gcagggacggcaggagtgggagcgccgccttgcggctctgattacacgacgacgggggcatcccgggtgcgcagg

SEQ ID NO: 892181 - DNA, 75 bp, synthetic construct
  source 1..75: mol_type = other DNA
tgacattatcagttttcttaattagcggatgtaaggaagaggcgaaaacaactaaatggtataaagaccatccag

SEQ ID NO: 892182 - DNA, 75 bp, synthetic construct
  source 1..75: mol_type = other DNA
ggcagcggtaagccggtgagcgtggccatcactgcacaccccgcgcctgaccggatacaggtcagcaccctgcct

SEQ ID NO: 892183 - DNA, 75 bp, synthetic construct
  source 1..75: mol_type = other DNA
gattctggataatctgccgccccggccctttaacatccggatggtccgggagacggcggacagcaccacggacca

SEQ ID NO: 892184 - DNA, 75 bp, synthetic construct
  source 1..75: mol_type = other DNA
gaaaaacggtgctgaaatttataaccgtaccgcgatggataatacgctgatttacagtggtgttattgatatgcc

SEQ ID NO: 892185 - DNA, 75 bp, synthetic construct
  source 1..75: mol_type = other DNA
ggtatcccacagcaagtatcagcgatttgctggttgtggtgatgaagaaatccacagcaggcatcagtatcagct

SEQ ID NO: 892186 - DNA, 75 bp, synthetic construct
  source 1..75: mol_type = other DNA
gagacggcgacagagcttgtggaggacacgcaggccattgcccgttacggccgtaacgtcacgaagatggatgct

SEQ ID NO: 892187 - DNA, 75 bp, synthetic construct
  source 1..75: mol_type = other DNA
cagggcgatccggcgtcggtatcgttccggattaacgcacctgcaaaacccgccaccattgagctgacgccgggg

SEQ ID NO: 892188 - DNA, 75 bp, synthetic construct
  source 1..75: mol_type = other DNA
accttcggggttcagtcactggtggagacgacctcaaagggtgaccgtaatccttcttctgtccggttgctgatt

SEQ ID NO: 892189 - DNA, 75 bp, synthetic construct
  source 1..75: mol_type = other DNA
ccgctgacggatatggacggtaatcccgtgatacatggcgtgacagccgtctggcgtgcaggggaacaggagcag

SEQ ID NO: 892190 - DNA, 75 bp, synthetic construct
  source 1..75: mol_type = other DNA
gagccagtttctggttgccgccaatcgtattgcgtttattgatccgtctaatggcaacacaagaccaatgtttgt

SEQ ID NO: 892191 - DNA, 75 bp, synthetic construct
  source 1..75: mol_type = other DNA
agcgtgggtgcggaagggcttcgccatgtaccgggggatgtcattgaaatctgcgatgatgactatgcgggtatc

SEQ ID NO: 892192 - DNA, 75 bp, synthetic construct
  source 1..75: mol_type = other DNA
atgcggatatcagtggtagtgtgaatgcgaactcaggaacgctcaacaatgtcacgattaaccagaactgtacga

SEQ ID NO: 892193 - DNA, 75 bp, synthetic construct
  source 1..75: mol_type = other DNA
ttgaaatcagcgcgcgttatcttggtacggcgctgtactggatagcctccggaccggatattgagccgggcaata

SEQ ID NO: 892194 - DNA, 75 bp, synthetic construct
  source 1..75: mol_type = other DNA
atctgagccgggaactgaactgcttcagggtcgatgatgaaaacaatgtcattcgggtgagaatgggcaggttat

SEQ ID NO: 892195 - DNA, 75 bp, synthetic construct
  source 1..75: mol_type = other DNA
tgaaacgcctgacggctcccaccattaccagcggtggaaatccgccggcattttccctgacaccagacggaaagc

SEQ ID NO: 892196 - DNA, 75 bp, synthetic construct
  source 1..75: mol_type = other DNA
cggctgacggcgaaaaatgccgatatcagcggtaacgtgaatgcgaactccgggacgctcaaaaaagtcacgatt

SEQ ID NO: 892197 - DNA, 75 bp, synthetic construct
  source 1..75: mol_type = other DNA
ttgtgcaggaccgtccgtcagatgtggtgtggcctacaccagcagtgatgtggtggtggatgataacggcgtggg

SEQ ID NO: 892198 - DNA, 75 bp, synthetic construct
  source 1..75: mol_type = other DNA
tcaaagggcgaccgtaatcactcttctgtccgactgctgattcagttgcagcgtaacggtaactgggtgacggaa

SEQ ID NO: 892199 - DNA, 75 bp, synthetic construct
  source 1..75: mol_type = other DNA
ccattaccagcggtggcaatcccccaacgttttcactgacacctgatggtcgactttctgcgagaaatgcggata

SEQ ID NO: 892200 - DNA, 75 bp, synthetic construct
  source 1..75: mol_type = other DNA
cggattaccgatatcaggcaggttgaaaccacagcccgctaccttggcacggggctgtactggatagccgccagt

SEQ ID NO: 892201 - DNA, 75 bp, synthetic construct
  source 1..75: mol_type = other DNA
ttgattaatttttttgttttatgcgcacgacgaccaccaaaatctcccccgtgtagatcgtcggcagcgtcagat

SEQ ID NO: 892202 - DNA, 75 bp, synthetic construct
  source 1..75: mol_type = other DNA
agttgtcgttcatgccaggtcaggcaaagtcaaaaccggggagcgggaggtccagatttccaaaaacgccagcag

SEQ ID NO: 892203 - DNA, 75 bp, synthetic construct
  source 1..75: mol_type = other DNA
tttgaccgccaaatcattattccgcccattatttttaacggtatggcgtatgacgatccggggagcggtaataac

SEQ ID NO: 892204 - DNA, 75 bp, synthetic construct
  source 1..75: mol_type = other DNA
acggattgctgatatcaggcaggttgaaaccacagcccgctatcttggcacggcgctgtactggatagctgccag

SEQ ID NO: 892205 - DNA, 75 bp, synthetic construct
  source 1..75: mol_type = other DNA
ggtggtggataacctgccgccgcgcccgttcaatatccggatgcgcaggatgacaccggacagcaccacagacca

SEQ ID NO: 892206 - DNA, 75 bp, synthetic construct
  source 1..75: mol_type = other DNA
ttctgatgctggcactggtaaaaatcatgtggcagtcgatgatcgcggcggcttctggagaacgccagttaatca

SEQ ID NO: 892207 - DNA, 75 bp, synthetic construct
  source 1..75: mol_type = other DNA
gcggcggcaatccgccggtattttccctgacatcggacgggcggttgacggcgaaaaatgccgatatcagcggta

SEQ ID NO: 892208 - DNA, 75 bp, synthetic construct
  source 1..75: mol_type = other DNA
ctgctgcaggcggaccgtatcgcgatgattaccccggagaacggcaacaccacgccgctgtttgtggcgcagggg

SEQ ID NO: 892209 - DNA, 75 bp, synthetic construct
  source 1..75: mol_type = other DNA
gtaagccggtgcgcgtggacatcactgcacaccccgccccggaccggatacaggtcagcattctgcctgatggcg

SEQ ID NO: 892210 - DNA, 75 bp, synthetic construct
  source 1..75: mol_type = other DNA
acgaaggcaaagccggtgacgcgcaccatcatgtcagcgaacattgaccgtctgcgggtcaccttcggggtgcag

SEQ ID NO: 892211 - DNA, 75 bp, synthetic construct
  source 1..75: mol_type = other DNA
aaccgaacggctctggataatactctgatttacacgggtgttattgatatgcctgcaggcagtggcgtaatgaca

SEQ ID NO: 892212 - DNA, 75 bp, synthetic construct
  source 1..75: mol_type = other DNA
actcctcatgccgtctgatagtacgaaaaaacggtgctgaaatttataaccgaacggctctggataatacgctga

SEQ ID NO: 892213 - DNA, 75 bp, synthetic construct
  source 1..75: mol_type = other DNA
cctctgcccgttatctggggacaggcagccagtggagcgtctccggcccgcacatcaagccggggaaggatttct

SEQ ID NO: 892214 - DNA, 75 bp, synthetic construct
  source 1..75: mol_type = other DNA
gcgcaggggaatcagttgttcatgaacgatgtgttcctgaagcggctgtttgcggtgagtatcacctcgtccggc

SEQ ID NO: 892215 - DNA, 75 bp, synthetic construct
  source 1..75: mol_type = other DNA
tgcccgttatctggggaccggcagtcagtggagtgtatccggcccgcacattaagcccgggaaggatttctggtt

SEQ ID NO: 892216 - DNA, 75 bp, synthetic construct
  source 1..75: mol_type = other DNA
gcggaccgtatcgcgatgattaccccggagaacggcaacaccacgccgctgtttgtggcacaggggaatcagctg

SEQ ID NO: 892217 - DNA, 75 bp, synthetic construct
  source 1..75: mol_type = other DNA
atgagctggctgcgctgtacatgctgaaggtgcagaaaacgaaaaacggcattccgtatgttgccggtattggtg

SEQ ID NO: 892218 - DNA, 75 bp, synthetic construct
  source 1..75: mol_type = other DNA
aagccagtggtggtctgcttcctcggtcgtggcgaaacgccagtggatgagcaggggctacagtttgcccgcggc

SEQ ID NO: 892219 - DNA, 75 bp, synthetic construct
  source 1..75: mol_type = other DNA
actgtcagattaaggggaaactgtcagccaatcagattgaaggcgatattgtcaaaacagtgggtaaggctttcc

SEQ ID NO: 892220 - DNA, 75 bp, synthetic construct
  source 1..75: mol_type = other DNA
tgcgggccattaacagctacggccagcagggcgaacctgcgaccaccaccttccggattaacgcgcctgcaaaac

SEQ ID NO: 892221 - DNA, 75 bp, synthetic construct
  source 1..75: mol_type = other DNA
cactgcgtcgtcgcctgttccgctgtgtctccatccgggaaaacacggacggcacctttgccatcacggcggtgc

SEQ ID NO: 892222 - DNA, 75 bp, synthetic construct
  source 1..75: mol_type = other DNA
ccgctaaaaatgcggatatcagtggcagtgtgaatgcgaactccgggacgctcaacaacgtcacgattaatgaga

SEQ ID NO: 892223 - DNA, 75 bp, synthetic construct
  source 1..75: mol_type = other DNA
gccactgggggaatacaccctgacggtgcgggccattaacagctacggccagcagggcgaacctgcgaccaccac

SEQ ID NO: 892224 - DNA, 75 bp, synthetic construct
  source 1..75: mol_type = other DNA
aggtgcagaaaacaaaaaacggtattccctatgtggccgggattggcgcggggattgaggatgttgatggtcaga

SEQ ID NO: 892225 - DNA, 75 bp, synthetic construct
  source 1..75: mol_type = other DNA
ctgattaacggcagtggtaagccggtgagtgtggacatcaccgaacaccccgcgccggaccggatacaggtcagt

SEQ ID NO: 892226 - DNA, 75 bp, synthetic construct
  source 1..75: mol_type = other DNA
tttaagattttccagaaaggcaatcagggggcaggcaatatcaccgactgtacggtgattgtgaccaaaaaagcc

SEQ ID NO: 892227 - DNA, 75 bp, synthetic construct
  source 1..75: mol_type = other DNA
cggtgctgaaatttataaccgtaccgcgctggataatacgctgatttacagtggtgttattgatatgccagcagg

SEQ ID NO: 892228 - DNA, 75 bp, synthetic construct
  source 1..75: mol_type = other DNA
gtctgcgcctgaccagtggaagcggtcaggacagccgtctggtgaccaccgccatcaccgcggatacagagcacc

SEQ ID NO: 892229 - DNA, 75 bp, synthetic construct
  source 1..75: mol_type = other DNA
gctgtcggccagccggttaatgatgctgaggtgtatctcaatttttttgaagggaaaataaacagtaccctgctg

SEQ ID NO: 892230 - DNA, 75 bp, synthetic construct
  source 1..75: mol_type = other DNA
cgggcgcattctgaacatcgatgccgccagtctcaccctgacgctggaccgggaggtgaggcttccggagaccgg

SEQ ID NO: 892231 - DNA, 75 bp, synthetic construct
  source 1..75: mol_type = other DNA
tgatcgaccgctatgctgcagccgagctgtctgttctggaggggaaatcaatcactttcaacgggcagcagatga

SEQ ID NO: 892232 - DNA, 75 bp, synthetic construct
  source 1..75: mol_type = other DNA
taagattttccagaaaggcaatcagggggcagggaatatcaccgactgtacggtgattgtgaccaaaaaagcggc

SEQ ID NO: 892233 - DNA, 75 bp, synthetic construct
  source 1..75: mol_type = other DNA
taatatcaccgactgtacggtgattgtgaccaaaaaagcggcttctgcgtattttcatgaaaggagatcactcaa

SEQ ID NO: 892234 - DNA, 75 bp, synthetic construct
  source 1..75: mol_type = other DNA
ggcagtcagaaaacgcccgacagatagcacaggtccgccagtacgtggataaaaaagggagtgaaattacctcga

SEQ ID NO: 892235 - DNA, 75 bp, synthetic construct
  source 1..75: mol_type = other DNA
ggaagtgaaatacgacacgccgatcacccggaccatcacgtcggcaaacattgaccgtctgcgctttaccttcgg

SEQ ID NO: 892236 - DNA, 75 bp, synthetic construct
  source 1..75: mol_type = other DNA
gccgaagtcaccgcagacagcggggagtatcaggtactggcccgctgggacacgccgaaggtggtgaaggggggg

SEQ ID NO: 892237 - DNA, 75 bp, synthetic construct
  source 1..75: mol_type = other DNA
aagagtggaaagacgccaacgataaatggaatgccatgtggggcgtcaaaattgagcagaccgaagacggtaagc

SEQ ID NO: 892238 - DNA, 75 bp, synthetic construct
  source 1..75: mol_type = other DNA
gtatcggtgccggtattgagaacacccctgacggcatgcagagtcaggtgctgctggcagcagacaggattgcga

SEQ ID NO: 892239 - DNA, 75 bp, synthetic construct
  source 1..75: mol_type = other DNA
aagcggattgcggatatcaggcaggttgaaaccacagcccgctaccttggcacggcgctgtactggatatccgcc

SEQ ID NO: 892240 - DNA, 75 bp, synthetic construct
  source 1..75: mol_type = other DNA
gtggtgatgccggatgatggcgcgtcgttccgctacagcttcagcgccctcaaggaccgccataatgccgttgag

SEQ ID NO: 892241 - DNA, 75 bp, synthetic construct
  source 1..75: mol_type = other DNA
ggggaccgagccgcggatgacctttaatgcgtacctggcacaacagcgtaaggcgtgggacgttctcagtgattt

SEQ ID NO: 892242 - DNA, 75 bp, synthetic construct
  source 1..75: mol_type = other DNA
tggtaaatggctggtatcccacagcaagtatcagcgatttgctggttgtggtgatgaagaaagccactgcaggca

SEQ ID NO: 892243 - DNA, 75 bp, synthetic construct
  source 1..75: mol_type = other DNA
taactttgaccgccagattattattccgcccattatttttaacggtatagcgtatgacgatccggggagcggaaa

SEQ ID NO: 892244 - DNA, 75 bp, synthetic construct
  source 1..75: mol_type = other DNA
catgaaacgacctaaacgtcgccgctgggtaaatgagaaatacacacgctgggtaaagacacagccgtgtgcgtg

SEQ ID NO: 892245 - DNA, 75 bp, synthetic construct
  source 1..75: mol_type = other DNA
taatctgccgtccggggtcgttcctgccgttcgccagccgctggaggaggataaagcattgctgccatttttcag

SEQ ID NO: 892246 - DNA, 75 bp, synthetic construct
  source 1..75: mol_type = other DNA
taatctgccgtccggggtcgttcctgccgttcgccagccgctggaggacgataaagcattactgccgtttttcag

SEQ ID NO: 892247 - DNA, 75 bp, synthetic construct
  source 1..75: mol_type = other DNA
catcacagcgaaaccgtcattcaccgttacggtaccggcgcgatggtgttgtgctggcactgtgacaaccagctg

SEQ ID NO: 892248 - DNA, 75 bp, synthetic construct
  source 1..75: mol_type = other DNA
tttctgccttaggtttgccgctcatcgttaaaccgagccgtgaaggttcaagtgttggaatgtcaaaagtagtag

SEQ ID NO: 892249 - DNA, 75 bp, synthetic construct
  source 1..75: mol_type = other DNA
agctgcatgcggataccgtggcatttgaagagaggtatggctcccagctggagctgatatttcgttttatcgatc

SEQ ID NO: 892250 - DNA, 75 bp, synthetic construct
  source 1..75: mol_type = other DNA
gagaaatatacgagctgggtgaagacacagccgtgtgcgtgttgtggtcagccagccgacgatccccatcacctg

SEQ ID NO: 892251 - DNA, 75 bp, synthetic construct
  source 1..75: mol_type = other DNA
catcacagtgaaatcgtcatacatcgttacggtaccggcgcgatggtgttgtgctggcactgcgacaaccagttg

SEQ ID NO: 892252 - DNA, 75 bp, synthetic construct
  source 1..75: mol_type = other DNA
gagagcgacatcgtaccgggagagcagaccgccaccagcatattgaaacaacgcacaaaaaatcttgcaccgttg

SEQ ID NO: 892253 - DNA, 75 bp, synthetic construct
  source 1..75: mol_type = other DNA
taatctgccgtccggggtcgttcctgccgttcgccagccgctggaggaagataaagcattcctgccgtttttcag

SEQ ID NO: 892254 - DNA, 75 bp, synthetic construct
  source 1..75: mol_type = other DNA
cagatgatccgcatcacatcattggtcatggactgggagggatgggaacaaaggctgatgatttgtttgttattc

SEQ ID NO: 892255 - DNA, 75 bp, synthetic construct
  source 1..75: mol_type = other DNA
gagagcgacatcataccgggagagcagacagccaccagcatactgaagcagcgcacaaaaaatattgcgctacca

SEQ ID NO: 892256 - DNA, 75 bp, synthetic construct
  source 1..75: mol_type = other DNA
gcgcacaaaaaatattacgctaccgcctcatacccaccagcaacagaccctaccacaggaaaagacgttagtaag

SEQ ID NO: 892257 - DNA, 75 bp, synthetic construct
  source 1..75: mol_type = other DNA
atcctgccagtggccacacggcgattatcatcacagcgaaaccgtcattcaccgttatggtaccggcgcaatggt

SEQ ID NO: 892258 - DNA, 75 bp, synthetic construct
  source 1..75: mol_type = other DNA
agagtgacatcgtaccgggagaacagacagccatcagcatactgaagcagcgcacaaaaaatattgcgctgccac

SEQ ID NO: 892259 - DNA, 75 bp, synthetic construct
  source 1..75: mol_type = other DNA
ctgctggtggcgctggcgcattgtctgactggttactgcgccatgttaaatcctgccagtggccacacggcgatt

SEQ ID NO: 892260 - DNA, 75 bp, synthetic construct
  source 1..75: mol_type = other DNA
tgtgcgtgttgtggtaagccagccgacgatccccatcacctgattggtcatggtcagggcggaatagggacaaaa

SEQ ID NO: 892261 - DNA, 75 bp, synthetic construct
  source 1..75: mol_type = other DNA
gtgcgggtattacttagacctgttctggtgcctgagcttgggctggtggtccttaagccgggccgtgaatccata

SEQ ID NO: 892262 - DNA, 75 bp, synthetic construct
  source 1..75: mol_type = other DNA
cttcacgtccaccagcaacaaaatccaccacagaaaaaaacggttgtcagtatcgctgttgatccggagtctcct

SEQ ID NO: 892263 - DNA, 75 bp, synthetic construct
  source 1..75: mol_type = other DNA
actggctgttgcgccatattaaatcctgccagtggccacacggtgattatcaccacagtgaaaccgtcattcacc

SEQ ID NO: 892264 - DNA, 75 bp, synthetic construct
  source 1..75: mol_type = other DNA
ttgggtaaatgagaaatatacgcgctgggtgaagacacagccgtgtgcgtgttgtggtaagccagccgacgatcc

SEQ ID NO: 892265 - DNA, 75 bp, synthetic construct
  source 1..75: mol_type = other DNA
gttgatccggagtctccggaatctttcatgaggcgacctaaacgtcgccgttgggtaaatgagaaatatacgcgc

SEQ ID NO: 892266 - DNA, 75 bp, synthetic construct
  source 1..75: mol_type = other DNA
acgatccgcatcatctgattggtcacgggcagggcggaatgggaaccaaagcacatgatctctttgttttgcctt

SEQ ID NO: 892267 - DNA, 75 bp, synthetic construct
  source 1..75: mol_type = other DNA
gacacagccgtgtgcatgttgtggaaagcctgctgatgatccccaccacttgataggccacggtcagggtggaat

SEQ ID NO: 892268 - DNA, 75 bp, synthetic construct
  source 1..75: mol_type = other DNA
gcgcggtctgccatccgggattgttcctgccgttcgccagccactgatggaagataaatcattactgccattttt

SEQ ID NO: 892269 - DNA, 75 bp, synthetic construct
  source 1..75: mol_type = other DNA
gtatagcccgtgaaaacctggtatcctggctactgaaggttgtaaacggccaattaggtttcagtgaggaccaca

SEQ ID NO: 892270 - DNA, 75 bp, synthetic construct
  source 1..75: mol_type = other DNA
tttttgtgctgcctttgtgcagaaaacaccacgacgaactgcatgcggataccgtggcatttgaagagaagtatg

SEQ ID NO: 892271 - DNA, 75 bp, synthetic construct
  source 1..75: mol_type = other DNA
ctgggtaaatgagaaatacacacgctgggtaaagacacagccgtgtgcgtgttgtggtaagccagcggacgatcc

SEQ ID NO: 892272 - DNA, 75 bp, synthetic construct
  source 1..75: mol_type = other DNA
gtggctggttcgtaatgacttggcggatgccttaccggaaagtgcagcccgtaaggcactgagattaccgacgcc

SEQ ID NO: 892273 - DNA, 75 bp, synthetic construct
  source 1..75: mol_type = other DNA
acgcgccgggcgcaatccgtctgtgctggcactgcgataaccagttgcgcgatcagttcacggaacggctggaat

SEQ ID NO: 892274 - DNA, 75 bp, synthetic construct
  source 1..75: mol_type = other DNA
gatcagttcacggaacggctggaatcaatggcaacggataactgtgcccgttgggtgttgtctgttgtgcgtcgg

SEQ ID NO: 892275 - DNA, 75 bp, synthetic construct
  source 1..75: mol_type = other DNA
gcggtaacgtgaatgcgaactccgggacgctcaacaacgtcacgattaacgagaactgtcgggttctgggaaaat

SEQ ID NO: 892276 - DNA, 75 bp, synthetic construct
  source 1..75: mol_type = other DNA
acagtttgagttctggttctcggaaaaacggattgctggtatcaggcaggttgaaaccacagcgcgctatcttgg

SEQ ID NO: 892277 - DNA, 75 bp, synthetic construct
  source 1..75: mol_type = other DNA
cgtctgtgctggcactgcgataaccagctgcgcgatcagttcacggaacggctggaatcaatggcaacggataac

SEQ ID NO: 892278 - DNA, 75 bp, synthetic construct
  source 1..75: mol_type = other DNA
ctgccagtggccacacggtgattatcaccacagtgaaaccgtcattcaccgttatggtaccggcgcaatggtgtt

SEQ ID NO: 892279 - DNA, 75 bp, synthetic construct
  source 1..75: mol_type = other DNA
ctgccagtggccacacggtgattatcatcacagtgaaaccgtcatacatcgttacggtaccggcgcgatggtgtt

SEQ ID NO: 892280 - DNA, 75 bp, synthetic construct
  source 1..75: mol_type = other DNA
tggtaccggaactcagtctggttatcgttaagccaggccgtgaatcaatgtcagtattccataacggcagaatat

SEQ ID NO: 892281 - DNA, 75 bp, synthetic construct
  source 1..75: mol_type = other DNA
ggataccgtggcatttgaagagaagtatggctcccagctggagctgatatttcgttttatcgatcgtgcgctggc

SEQ ID NO: 892282 - DNA, 75 bp, synthetic construct
  source 1..75: mol_type = other DNA
tgcgcatgttgtggaaagccagctgatgatccgcatcacctgattggccatgggcagggcggaatgggaacaaag

SEQ ID NO: 892283 - DNA, 75 bp, synthetic construct
  source 1..75: mol_type = other DNA
gcggggggcgtggaatgccttgagagctggttacttcgtgaaacaggctgccagtggcctcattccggctggcac

SEQ ID NO: 892284 - DNA, 75 bp, synthetic construct
  source 1..75: mol_type = other DNA
ctggagtttgagaaaaagtacggctcccaggttgagttaatttttcattttcttgatcacgccttcgcaacaggc

SEQ ID NO: 892285 - DNA, 75 bp, synthetic construct
  source 1..75: mol_type = other DNA
tcgtgctgctggtggtgctggtgcattgtctgactggctgttgcgccatattaaatcctgccagtggccacacgg

SEQ ID NO: 892286 - DNA, 75 bp, synthetic construct
  source 1..75: mol_type = other DNA
agcatggatgattgacgtcatacgccatgcaatgaatggcacacaggagcgggaattatctctggctgaattatc

SEQ ID NO: 892287 - DNA, 75 bp, synthetic construct
  source 1..75: mol_type = other DNA
cagggtggaatgggtacaaaagcgcatgacctctttgtgttgcctttgtgcagaaagcatcacgacgagctgcat

SEQ ID NO: 892288 - DNA, 75 bp, synthetic construct
  source 1..75: mol_type = other DNA
catgttgtggaaagcctgctgatgatccccaccacctgataggccacggtcagggtggaatgggtacaaaagcgc

SEQ ID NO: 892289 - DNA, 75 bp, synthetic construct
  source 1..75: mol_type = other DNA
ccacctgattggtcatggtcagggtggaatgggtacaaaagcgcatgacctttttgtgttgcctttgtgcagaaa

SEQ ID NO: 892290 - DNA, 75 bp, synthetic construct
  source 1..75: mol_type = other DNA
tcctgccagtggccacacggcgattatcatcacagcgaaaccgtcattcaccgttatggtaccggcgcaatggtg

SEQ ID NO: 892291 - DNA, 75 bp, synthetic construct
  source 1..75: mol_type = other DNA
agcaacttgctcaacagaatctggcagcctggatgattgacgtcattcggcatgcaatgaatggtgcacaagagc

SEQ ID NO: 892292 - DNA, 75 bp, synthetic construct
  source 1..75: mol_type = other DNA
ccgtccggcatcgtccctgccgttcgccagccgctggcggaggataaatcattactgccgtttttcagcaatgag

SEQ ID NO: 892293 - DNA, 75 bp, synthetic construct
  source 1..75: mol_type = other DNA
ggcaacttgctcatcaaaacctgtcagcatggatgactgacgtcatccgtcacgcaatgaatggcacacaggagc

SEQ ID NO: 892294 - DNA, 75 bp, synthetic construct
  source 1..75: mol_type = other DNA
catcacagcgaaacagccattcaccgttatggtaccggcgcgatggtgttgtgctggcactgtgacaaccagctg

SEQ ID NO: 892295 - DNA, 75 bp, synthetic construct
  source 1..75: mol_type = other DNA
ctggtgggcggtctgcaatcaggtggcggacgcgctaccggagacagtattacgtcgttctctggggttacgtgc

SEQ ID NO: 892296 - DNA, 75 bp, synthetic construct
  source 1..75: mol_type = other DNA
gggaattatcgctggctgaattatcctggtgggcaaccataaataacgtagcggacgcactaccggagacggtat

SEQ ID NO: 892297 - DNA, 75 bp, synthetic construct
  source 1..75: mol_type = other DNA
cctgccgttcgccagccattggcggaggataaatcactactgccatttttcagcgatgagcgggtgattcgtgct

SEQ ID NO: 892298 - DNA, 75 bp, synthetic construct
  source 1..75: mol_type = other DNA
ctggtgggcggtctgtaatcaggtggtggatgcactacctgaggttgtatcgcgccgttcgctgggattaccagc

SEQ ID NO: 892299 - DNA, 75 bp, synthetic construct
  source 1..75: mol_type = other DNA
gttgccgctgggttaatgagaaatacacgcgctgggtaaagacacagccgtgtgcgtgttgtggtaagcctgctg

SEQ ID NO: 892300 - DNA, 75 bp, synthetic construct
  source 1..75: mol_type = other DNA
cacaaaaaatattgcgctaccgcctcacacccaccagcaacagaacccaccacaggaaaagacggtggtaagcat

SEQ ID NO: 892301 - DNA, 75 bp, synthetic construct
  source 1..75: mol_type = other DNA
ctgccagtggccacacggcgactatcaccacagtgaaaccgtcattcaccgttatggcgctggcgcgatggtgtt

SEQ ID NO: 892302 - DNA, 75 bp, synthetic construct
  source 1..75: mol_type = other DNA
gtcatcggtcacgcaataagcggtacgcaggagcgtgaattatctctggctgaattatcctggtgggcggtccgc

SEQ ID NO: 892303 - DNA, 75 bp, synthetic construct
  source 1..75: mol_type = other DNA
cgtatttgtaagtgccggggacgtgattctgcctaatcttgcgcttgtcacgggcgtagtgatcgcgggatgggg

SEQ ID NO: 892304 - DNA, 75 bp, synthetic construct
  source 1..75: mol_type = other DNA
cagctgctggacaaagtctctccgtcccagtgggtggcgataggtgtgctggggagtctgctgtttggcctgctg

SEQ ID NO: 892305 - DNA, 75 bp, synthetic construct
  source 1..75: mol_type = other DNA
gtctggttctgggcttcctgacttatctgacaaatctgtacttcaaaatcagagaagacaagcgtaaggctgcac

SEQ ID NO: 892306 - DNA, 75 bp, synthetic construct
  source 1..75: mol_type = other DNA
ccgttaacggcgctgaaagtacaaaccgaagtcgcacagctttccgacgacgatccgcaggcacggaaaaaagca

SEQ ID NO: 892307 - DNA, 75 bp, synthetic construct
  source 1..75: mol_type = other DNA
caggtgtgtcatacaccacgtcagcggtgggaacgggctactggttcctgcagttactggacagggtttccccgt

SEQ ID NO: 892308 - DNA, 75 bp, synthetic construct
  source 1..75: mol_type = other DNA
tggcctgctgacgtatctgactaacctgtatttcaaaatcagagaggaccgtcgtaaggcggcgcggggggagta

SEQ ID NO: 892309 - DNA, 75 bp, synthetic construct
  source 1..75: mol_type = other DNA
gctggtggcgtggaatgtcttgaaagctggttacttcgtgaaaagggctgtcagtggcctcattccggatggcac

SEQ ID NO: 892310 - DNA, 75 bp, synthetic construct
  source 1..75: mol_type = other DNA
ggcgaagtatctctctgatgagacacagtatttctgccccgcaggtctggaagcgtcacaagaggccaatttgca

SEQ ID NO: 892311 - DNA, 75 bp, synthetic construct
  source 1..75: mol_type = other DNA
ggagaacagacagccatcagcatactgaagcagcgcacaaaaaattttgcgccgttgcctcacgcccaccagcaa

SEQ ID NO: 892312 - DNA, 75 bp, synthetic construct
  source 1..75: mol_type = other DNA
ggggttatgaaatccatggataagttaacaacgggtgtcgcctatggtacctcagcaggtagtgccgggtactgg

SEQ ID NO: 892313 - DNA, 75 bp, synthetic construct
  source 1..75: mol_type = other DNA
ctgcgattggtgtactggggagtctggttctgggcttcctgacttatctgacaaatctgtacttcaaaatcagag

SEQ ID NO: 892314 - DNA, 75 bp, synthetic construct
  source 1..75: mol_type = other DNA
ggggagtctgctgtttgggctgctgacatatctgacgaacctgtattttaagattaaagaagaccggcgtaaggc

SEQ ID NO: 892315 - DNA, 75 bp, synthetic construct
  source 1..75: mol_type = other DNA
aaacacggcagccagctgttgttgctgattcgttttttaatgcacgcgagaaattcgggcgtcctgaagtggaaa

SEQ ID NO: 892316 - DNA, 75 bp, synthetic construct
  source 1..75: mol_type = other DNA
gactggcacagcgagaacatgacaacaatgcgacacgcgccgggcgcaatccgtctgtgctggcactgcgataac

SEQ ID NO: 892317 - DNA, 75 bp, synthetic construct
  source 1..75: mol_type = other DNA
gtaaagacacagccgtgtgcgtgttgtggtaagccagccgacgatccccatcacctgattggtcatggtcagggc

SEQ ID NO: 892318 - DNA, 75 bp, synthetic construct
  source 1..75: mol_type = other DNA
ccgcaatgaggcagtgatccgtcgtgctggtggcgtggaatgccttgagagctggttacttcgtgaaaaaggctg

SEQ ID NO: 892319 - DNA, 75 bp, synthetic construct
  source 1..75: mol_type = other DNA
acgggtgattcgtgctgctggtggtgctggtgcattgtctgactggctgttgcgccatattaaatcctgccagtg

SEQ ID NO: 892320 - DNA, 75 bp, synthetic construct
  source 1..75: mol_type = other DNA
ggcagcttgctcaacaaaatctgacagcctggatgattgacgtcatacgtcacgcaataagcggtacacaggaac

SEQ ID NO: 892321 - DNA, 75 bp, synthetic construct
  source 1..75: mol_type = other DNA
actggctcctgcgtcatgttaaatcctgccagtggcctcatggtgactaccatcacagcgaaaccgtcatacatc

SEQ ID NO: 892322 - DNA, 75 bp, synthetic construct
  source 1..75: mol_type = other DNA
gaaaaatacggcagccagctgttgttgctgattcgttttttaatgcacgcgagaaattcgggtgtcctgaagtgg

SEQ ID NO: 892323 - DNA, 75 bp, synthetic construct
  source 1..75: mol_type = other DNA
ctggtgggcggtctgcaatcaggtggctgatgcgcttccggagtctgtatcgtgtcgttcactgggattaccggt

SEQ ID NO: 892324 - DNA, 75 bp, synthetic construct
  source 1..75: mol_type = other DNA
ggagcgtgaattatctctggctgaattatcctggtgggcggtccgcaatcaggtggcggacgcgctaccggaagc

SEQ ID NO: 892325 - DNA, 75 bp, synthetic construct
  source 1..75: mol_type = other DNA
gttgatccggagtctcctgaatcgttcatgaagcggcctaaacgtcgccgttgggttaatgagaaatacacgcgc

SEQ ID NO: 892326 - DNA, 75 bp, synthetic construct
  source 1..75: mol_type = other DNA
cacgatattttcacgctaccgttgtgccgggagcaccacaacgaacttcatgcagacccgctggagtttgagaaa

SEQ ID NO: 892327 - DNA, 75 bp, synthetic construct
  source 1..75: mol_type = other DNA
caccacaggaaaagacggtggtaaacgtcgccgttgatcctgagtctcctgaatctttcatgaagcggcctaaac

SEQ ID NO: 892328 - DNA, 75 bp, synthetic construct
  source 1..75: mol_type = other DNA
cccgccgttcgacagtcgctggcagaggataaaacattactgccatttttcagcaacgaacgggtgattcgtgct

SEQ ID NO: 892329 - DNA, 75 bp, synthetic construct
  source 1..75: mol_type = other DNA
aggataaatcattactgccgtttttcagcaatgagcgtgtgattcgtgctgctggtggtactggtgcattgtctg

SEQ ID NO: 892330 - DNA, 75 bp, synthetic construct
  source 1..75: mol_type = other DNA
gccggtggcactggtgcactgtctgactggctcctgcgtcatgttaaatcctgccagtggcctcatagtgactac

SEQ ID NO: 892331 - DNA, 75 bp, synthetic construct
  source 1..75: mol_type = other DNA
ccagtggcctcattccgactggcacagcgagaacatgaccacaatgcgacacgctccgggcgcaatccgtctgtg

SEQ ID NO: 892332 - DNA, 75 bp, synthetic construct
  source 1..75: mol_type = other DNA
tactcgctgggtaaaaacacagaagtgcatgacgtgcggcaatcaggcagatgatccgcatcacatcattggcca

SEQ ID NO: 892333 - DNA, 75 bp, synthetic construct
  source 1..75: mol_type = other DNA
ggagaaaatccgctcgctttatcgcgagagcgacatcataccgggagagcagacagccaccagcatactgaagca

SEQ ID NO: 892334 - DNA, 75 bp, synthetic construct
  source 1..75: mol_type = other DNA
tcttactctcaccagcaacagaaccagccacaggaaaagacggtggtaagcatcactgttgatccggagtctccg

SEQ ID NO: 892335 - DNA, 75 bp, synthetic construct
  source 1..75: mol_type = other DNA
gcgcacaaaaaatattgcgctgccacttcacgtccaccagcaacaaaatccaccacagaaaaaaacggttgccag

SEQ ID NO: 892336 - DNA, 75 bp, synthetic construct
  source 1..75: mol_type = other DNA
tatcgccgttgatccggagtctcctgaatcgttcatgaagcggcctaaacgtcgccgttgggttaatgagaaata

SEQ ID NO: 892337 - DNA, 75 bp, synthetic construct
  source 1..75: mol_type = other DNA
tggtaccggaactcgggctggtggtccttaatccgggccgtgaatccatgccggtattttacaatacccgggtgt

SEQ ID NO: 892338 - DNA, 75 bp, synthetic construct
  source 1..75: mol_type = other DNA
gccagccgacgatccccatcacctgattggtcatggtcagggcggaatggggacaaaatctcacgatattttcac

SEQ ID NO: 892339 - DNA, 75 bp, synthetic construct
  source 1..75: mol_type = other DNA
tgtaccgcgaaagcgacatcgtaccgggagagcagaccgccaccagcatattgaaacagcgcacaaaaaatcttg

SEQ ID NO: 892340 - DNA, 75 bp, synthetic construct
  source 1..75: mol_type = other DNA
gaaagcgacatcataccgggagagcagacagccaccagcatactgaagcagcgcacaaaaaatattgcgctaccg

SEQ ID NO: 892341 - DNA, 75 bp, synthetic construct
  source 1..75: mol_type = other DNA
atatcagtgcgaactcgggcacgctgaataatgtcgtgatagcggagaactgtaccatcaaaggtactctgagag

SEQ ID NO: 892342 - DNA, 75 bp, synthetic construct
  source 1..75: mol_type = other DNA
gacggacgcctttatatcgcgggtatcggtgccggtattgagaatacgccagcaggaatgcagagtcaggtgctg

SEQ ID NO: 892343 - DNA, 75 bp, synthetic construct
  source 1..75: mol_type = other DNA
aggcaaaaattgcagacgccgcacaggtggaaacctctgcccgttatctggggaccggcagtcagtggagtgtct

SEQ ID NO: 892344 - DNA, 75 bp, synthetic construct
  source 1..75: mol_type = other DNA
gaaccagattgaaggcgatctcgttaaaacagtgggcaaagctttcccccgcacgagcacttatgccagtggcac

SEQ ID NO: 892345 - DNA, 75 bp, synthetic construct
  source 1..75: mol_type = other DNA
taactggacgccaacgaccagtatcagcgaccttcttgttgttgtgatgaagaaatctacagccggtatcagtat

SEQ ID NO: 892346 - DNA, 75 bp, synthetic construct
  source 1..75: mol_type = other DNA
cctgtccatcgatgccgccagccgcaccctgacactggaccgtgaggtgaccctgccggagacaggtgccgccac

SEQ ID NO: 892347 - DNA, 75 bp, synthetic construct
  source 1..75: mol_type = other DNA
acacggacggcacctttgccatcacggcggtgcagcacgtaccggaaaaagaagccattgtggataacggggcca

SEQ ID NO: 892348 - DNA, 75 bp, synthetic construct
  source 1..75: mol_type = other DNA
gtgaacctgattaacggcagcggtaagccggtgagtgtggacatcaccgcacaccccgcgccggaccggatacag

SEQ ID NO: 892349 - DNA, 75 bp, synthetic construct
  source 1..75: mol_type = other DNA
ctctatgccctcggacagtactgtgaccagccggttccggatggctttggtggtacagaaccccgtatgaccttt

SEQ ID NO: 892350 - DNA, 75 bp, synthetic construct
  source 1..75: mol_type = other DNA
acgaagtgttcctgaaatatctgacggctcccaccattaccagcggcggtaatcctccggcattttccctgacac

SEQ ID NO: 892351 - DNA, 75 bp, synthetic construct
  source 1..75: mol_type = other DNA
ccgcctgatagtacggaaaaacggtgctgaaatttataaccgtaccgcgctggataatacgctgatttacagtgg

SEQ ID NO: 892352 - DNA, 75 bp, synthetic construct
  source 1..75: mol_type = other DNA
attgcgatggttaatcctgcgaatggcaacacaaagccgatgtttgttggtcagggcgatcagatattcatgaac

SEQ ID NO: 892353 - DNA, 75 bp, synthetic construct
  source 1..75: mol_type = other DNA
atgattaatcctgcgaatggcaacacaaagccgatgtttgttgggcagggcgatcagatattcatgaacgaagtg

SEQ ID NO: 892354 - DNA, 75 bp, synthetic construct
  source 1..75: mol_type = other DNA
ttcaatgtttcttcatatggtgctaataactggacgccaacgaccagtatcagcgaccttcttgttgttgtgatg

SEQ ID NO: 892355 - DNA, 75 bp, synthetic construct
  source 1..75: mol_type = other DNA
agtgttattccgcggtggtaagcatgagaatttcaacagtaataaccaacagtcatactggtattcaacctgccg

SEQ ID NO: 892356 - DNA, 75 bp, synthetic construct
  source 1..75: mol_type = other DNA
gtacggaaaaacggtgctgaaatttataaccgtaccgcgctggataatacgctgatttacagtggtgttattgat

SEQ ID NO: 892357 - DNA, 75 bp, synthetic construct
  source 1..75: mol_type = other DNA
ataccggcacgctcaataatgtcaccattaacgagaactgtgtcatcagagggaaactgtctgcaaaccagattg

SEQ ID NO: 892358 - DNA, 75 bp, synthetic construct
  source 1..75: mol_type = other DNA
ttttttattgcagaaaagcgagaggtaattatgcgtaaactttatgccgccattttgtccgcagccatctgtctg

SEQ ID NO: 892359 - DNA, 75 bp, synthetic construct
  source 1..75: mol_type = other DNA
tgtgcaggcactggtggaaaccaactcaaagggggacaggaatccatcgcaggttcgcctgctggttcagataca

SEQ ID NO: 892360 - DNA, 75 bp, synthetic construct
  source 1..75: mol_type = other DNA
ccggttaagagtgacccgcaatggtcaggagatttttaatcagtccacgacggatgctcagggcgtattttcctc

SEQ ID NO: 892361 - DNA, 75 bp, synthetic construct
  source 1..75: mol_type = other DNA
caacaatgtcacgattaacgagaactgtcgggttctgggaaaactgtccgcgaaccagattgaaggcgatctcgt

SEQ ID NO: 892362 - DNA, 75 bp, synthetic construct
  source 1..75: mol_type = other DNA
tcatgataccgccagtgttattccgcggtggtaagcatgagaatttcaacagtaataaccaacagtcatactggt

SEQ ID NO: 892363 - DNA, 75 bp, synthetic construct
  source 1..75: mol_type = other DNA
aacaactggacgccgacaacgtacatcagtgatttactggttgtggtcatgaaaaaatccacggcagggatcagt

SEQ ID NO: 892364 - DNA, 75 bp, synthetic construct
  source 1..75: mol_type = other DNA
gacgatcagccgtttgaccggcaaattgttattccggcggtggcattcagcggcgctaaacatgagagagagcat

SEQ ID NO: 892365 - DNA, 75 bp, synthetic construct
  source 1..75: mol_type = other DNA
ttcgcggtggtaagcatgaaaacttcaacagcaacaaccaacagtcatactggtattcaacctgtaagctgcagg

SEQ ID NO: 892366 - DNA, 75 bp, synthetic construct
  source 1..75: mol_type = other DNA
tcatacaccgaaatcatcgatgtgaaacagtgctacccgaacacggccattgtggggctgcaggtgaatgcggag

SEQ ID NO: 892367 - DNA, 75 bp, synthetic construct
  source 1..75: mol_type = other DNA
atgctgactcacccgcgctacggcatgggaaaacgtctgggggcggcagacgtggacaaatgggcgctgtatgcc

SEQ ID NO: 892368 - DNA, 75 bp, synthetic construct
  source 1..75: mol_type = other DNA
ccggatacaggtcagtaccctgccggatggtgtggatacatacggtgtgtgggggctttccctgccgtcactgcg

SEQ ID NO: 892369 - DNA, 75 bp, synthetic construct
  source 1..75: mol_type = other DNA
atcgcagatacatctcaggtggaaacctctgcccgttatctggggaccggcagtcagtggagtgtatccggcccg

SEQ ID NO: 892370 - DNA, 75 bp, synthetic construct
  source 1..75: mol_type = other DNA
acccgcgctacggcatgggaaaacgtctgggggcggcggatgtggacaagtgggcgctgtatgccatcgggcagt

SEQ ID NO: 892371 - DNA, 75 bp, synthetic construct
  source 1..75: mol_type = other DNA
cagggaccattaccgtcagggtttatgacgatcagccgtttgaccggcagattgttattccggcggtggcattca

SEQ ID NO: 892372 - DNA, 75 bp, synthetic construct
  source 1..75: mol_type = other DNA
cggatgtggtgtggccgtacaccaacagcgatgtggtggtggatgataacggcgtgggtttccgctacagcttca

SEQ ID NO: 892373 - DNA, 75 bp, synthetic construct
  source 1..75: mol_type = other DNA
gaaagcgacatcgtaccgggagagcagaccgccaccagcatactgaagcagcgcacaaaaaatattgctccgttg

SEQ ID NO: 892374 - DNA, 75 bp, synthetic construct
  source 1..75: mol_type = other DNA
tgctgctggcggcagacaggattgcgatgattaatcctgcaaatggcaacacaaagccgatgtttgttggtcagg

SEQ ID NO: 892375 - DNA, 75 bp, synthetic construct
  source 1..75: mol_type = other DNA
tccggtcagcgtggaggtccagtccgtcaccgacggcgtgaaggtgaaagtgagccgggttcctgacggcgttgc

SEQ ID NO: 892376 - DNA, 75 bp, synthetic construct
  source 1..75: mol_type = other DNA
attggtcatggactgggagggatgggaacaaaggctgatgatttgtttgttataccgctgtgccgtaaatgccat

SEQ ID NO: 892377 - DNA, 75 bp, synthetic construct
  source 1..75: mol_type = other DNA
catggtgactatcatcacagtgaaatcgtcatacatcgttacggtaccggcgcgatggtgttgtgctggcactgc

SEQ ID NO: 892378 - DNA, 75 bp, synthetic construct
  source 1..75: mol_type = other DNA
ggcgcttcccataacaaaggccagggggaaaaggttaccggaaacagtcttgagcttcctttcggcgcgtatgtt

SEQ ID NO: 892379 - DNA, 75 bp, synthetic construct
  source 1..75: mol_type = other DNA
ctcgcctgaagccgcagcagaaatacattcgtggcctgttctgcggtggcacgctgtgcgatgaaacgatgttcg

SEQ ID NO: 892380 - DNA, 75 bp, synthetic construct
  source 1..75: mol_type = other DNA
cgatccagaagtggcggtgatcgtgatggattttgtgctcggatttggatcgcatgaagatccggtcggttccac

SEQ ID NO: 892381 - DNA, 75 bp, synthetic construct
  source 1..75: mol_type = other DNA
ttatgttacgcccaaaacgtcgccgctgggttaatgaaaagtacacgcgctgggttaagacgcagccgtgcgcat

SEQ ID NO: 892382 - DNA, 75 bp, synthetic construct
  source 1..75: mol_type = other DNA
aggagctgtggacgcagattgataacggtcagcttgcgcctgacctggctgaaatcaggacgtccattacggatg

SEQ ID NO: 892383 - DNA, 75 bp, synthetic construct
  source 1..75: mol_type = other DNA
acccgcaccatcacgtcggcaaacatcgatcgtctgcgctttactttcggtgtgcaggcactggtggaaaccacc

SEQ ID NO: 892384 - DNA, 75 bp, synthetic construct
  source 1..75: mol_type = other DNA
accgtggcatttgaagagaagtatggctcccagttggagctgatatttcgttttatcgatcgcgcgctggcaact

SEQ ID NO: 892385 - DNA, 75 bp, synthetic construct
  source 1..75: mol_type = other DNA
gcattcaagtctgaatggttccagcaccctccatgcactgcagaacaggccgaatggctgattcattcttaccgc

SEQ ID NO: 892386 - DNA, 75 bp, synthetic construct
  source 1..75: mol_type = other DNA
tgccgttgatcctgagtctccggaatctttcatgaaacgacctaaacgtcgccgctgggttaacgagaaatacac

SEQ ID NO: 892387 - DNA, 75 bp, synthetic construct
  source 1..75: mol_type = other DNA
gttacggtaccggtgcaatggtgttgtgttggcactgcgacaaccagctgcgtgaccagacttccgaatcactcg

SEQ ID NO: 892388 - DNA, 75 bp, synthetic construct
  source 1..75: mol_type = other DNA
ttgctcaccgtttggggattgtacttttcaggcccggtcctgatgcgatgcctttgtttatgcaggggcgtgtgc

SEQ ID NO: 892389 - DNA, 75 bp, synthetic construct
  source 1..75: mol_type = other DNA
ggattgcgatgattaatcctgcgaatggcaacacaaagccgatgtttgttggtcagggcgatcagatattcatga

SEQ ID NO: 892390 - DNA, 75 bp, synthetic construct
  source 1..75: mol_type = other DNA
taatctgccgtccggggtcgttcctgccgttcgccagccgctgggggatgagaaatcatttctgccatttttcag

SEQ ID NO: 892391 - DNA, 75 bp, synthetic construct
  source 1..75: mol_type = other DNA
taatctgccgtccggggtcgttcctgccgttcgccagccgctgggggatgataaagcatttctgccatttttcag

SEQ ID NO: 892392 - DNA, 75 bp, synthetic construct
  source 1..75: mol_type = other DNA
tgccgttgatccggagtctccggaatccttcatgaaacgacctaaacgtcgccgctgggtaaatgagaaatacac

SEQ ID NO: 892393 - DNA, 75 bp, synthetic construct
  source 1..75: mol_type = other DNA
gtttgagaaaaagtacggctctcagattgagttaatttttcgttttcttgatcacgcctttgcgactggcgtgct

SEQ ID NO: 892394 - DNA, 75 bp, synthetic construct
  source 1..75: mol_type = other DNA
cctcacgtccaccagcaacagaactcaccgcaggaaaaggcggttgtcagcattgctgttgatccggagtctccg

SEQ ID NO: 892395 - DNA, 75 bp, synthetic construct
  source 1..75: mol_type = other DNA
taatctgccgtccggggtcgttcctgccgttcgccagccgctgggggatgagaaagcatttctgccttttttcag

SEQ ID NO: 892396 - DNA, 75 bp, synthetic construct
  source 1..75: mol_type = other DNA
gccagatgctgcttgatgccggggtaattctggccagcagcagcaccaataccggattgctggcgcgtgaattta

SEQ ID NO: 892397 - DNA, 75 bp, synthetic construct
  source 1..75: mol_type = other DNA
gccagtggccgggccagcaatgatgcagaagggtatctggggctgtttcgggaaaaaatggaaaactgcatctgg

SEQ ID NO: 892398 - DNA, 75 bp, synthetic construct
  source 1..75: mol_type = other DNA
gcagagtatcctggtgaacaaaaccccgctgacggacacggacggtaatcctgtgatacatggtgtgaccgcggt

SEQ ID NO: 892399 - DNA, 75 bp, synthetic construct
  source 1..75: mol_type = other DNA
gaggtgagcgcagctgacggtcagtatctggcgcaggcgaaatgggacacgccgcgggtggtgaagggcgtgcgc

SEQ ID NO: 892400 - DNA, 75 bp, synthetic construct
  source 1..75: mol_type = other DNA
ggattcccgtgcaccggagcggtggccatcagggaccattaccgtcaggatttatgacgatcagccgtttgaccg

SEQ ID NO: 892401 - DNA, 75 bp, synthetic construct
  source 1..75: mol_type = other DNA
atatgcctagtggtggtggtagcgtcactctggatttaagattttccagaaaggcaatcagggggcaggcaatat

SEQ ID NO: 892402 - DNA, 75 bp, synthetic construct
  source 1..75: mol_type = other DNA
ggggaaccggccaccaccacgttcaggattaatgcacctgcggtacccgccacgattgagctgacaccgggctat

SEQ ID NO: 892403 - DNA, 75 bp, synthetic construct
  source 1..75: mol_type = other DNA
accgcagacacggagcaccgtttcagtggtctgccgctgggggaatacaccctgacggtgcgggccattaacagc

SEQ ID NO: 892404 - DNA, 75 bp, synthetic construct
  source 1..75: mol_type = other DNA
tagataacagccagcttgcagatgagatggcggagatgaagaccagcatcacggaaacccgcaatgaaatcacac

SEQ ID NO: 892405 - DNA, 75 bp, synthetic construct
  source 1..75: mol_type = other DNA
ctggctcaggggttgtgggaactgatagataacagccagcttgcagatgagatggcggagatgaagaccagcatc

SEQ ID NO: 892406 - DNA, 75 bp, synthetic construct
  source 1..75: mol_type = other DNA
atcatttccgaaacaggctggtacgtggggtaacacggaaacaccaaacgggacggttacagtcaccatcagcga

SEQ ID NO: 892407 - DNA, 75 bp, synthetic construct
  source 1..75: mol_type = other DNA
gcgcgctgggatacgccgaaggtggtgaagggcgtgagctttatgcttcgcctgaccgtggccgccgatgacggc

SEQ ID NO: 892408 - DNA, 75 bp, synthetic construct
  source 1..75: mol_type = other DNA
gttcagaccaggttcagagctgatgcccctgtttatgcaggggcgtgtcctgctggagcctgagccggaacgtta

SEQ ID NO: 892409 - DNA, 75 bp, synthetic construct
  source 1..75: mol_type = other DNA
acatctcgacctgcataccctgaaccagccgttgattgcggatgtgcgtgcgcgtctgcaaccgcagcagaaata

SEQ ID NO: 892410 - DNA, 75 bp, synthetic construct
  source 1..75: mol_type = other DNA
gtctgtcacccgggagagtgaccttgttccttcggttcctgccaccagcattatccaggataaagcgaaaaaggt

SEQ ID NO: 892411 - DNA, 75 bp, synthetic construct
  source 1..75: mol_type = other DNA
gaccattaccgtcagggtttatgacgatcagccgtttgaccggcaaattgttattccggcggtggcattcagcgg

SEQ ID NO: 892412 - DNA, 75 bp, synthetic construct
  source 1..75: mol_type = other DNA
ggtcaggcaaagtcaaaaccggggagcgggaggtccagatttccaaaaacgccagcagatatgagccggtatatt

SEQ ID NO: 892413 - DNA, 75 bp, synthetic construct
  source 1..75: mol_type = other DNA
ccatttatgacccgacggtgcagtttgagttctggttctcggaggagaaaatcgcagacacatctcaggtggaaa

SEQ ID NO: 892414 - DNA, 75 bp, synthetic construct
  source 1..75: mol_type = other DNA
gagtgacccgcaatggtcaggagatttttaagcagtccacgacggatgctcagggcgtattttcctcagttatag

SEQ ID NO: 892415 - DNA, 75 bp, synthetic construct
  source 1..75: mol_type = other DNA
aatcagtgatgatcagaagtttgaccggcaggtcatgataccgccagtgttattccgcggtggtaagcatgagaa
